(19) United States
(12) Patent Application Publication
(10) Pub. No.: US 2026/0218267 A1
(43) Pub. Date: Jul. 30, 2026

(54) METHODS AND COMPOSITIONS FOR PRODUCTION AND PURIFICATION OF PEPTIDES

(71) Applicant: MICROPEP TECHNOLOGIES S.A., Auzeville-Tolosane (FR)

(72) Inventors: Orso SUBRINI, Auzeville-Tolosane (FR); Renaud CARTIER, Auzeville-Tolosane (FR); Mikaêl Stéphane COURBOT, Auzeville-Tolosane (FR)

(73) Assignee: MICROPEP TECHNOLOGIES S.A., Auzeville-Tolosane (FR)

(21) Appl. No.: 19/159,034

(22) PCT Filed: Feb. 23, 2024
(86) PCT No.: PCT/EP2024/054685

§ 371 Date: Aug. 22, 2025

Related U.S. Application Data
(60) Provisional application No. 63/486,652, filed on Feb. 23, 2023.
(60) Provisional application No. 63/486,653, filed on Feb. 23, 2023.

(51) Int. Cl. C12P 21/02; A01N 37/46; A01P 15/00; C07K 14/435; C12N 1/20

(52) U.S. Cl. CPC C12P 21/02; A01N 37/46; A01P 15/00; C07K 14/435; C12N 1/20; C07K 2319/01

(57) ABSTRACT

Provided herein are methods of producing peptides from inclusion bodies by linking two or more oligopeptides to an insoluble carrier polypeptide like onconase or TAF12, wherein the oligopeptides are released from the insoluble carrier protein by sequence-specific, chemical cleavage of the peptide bond using acids like acetic acid. Also provided herein are onconase variants with improved properties.

### CROSS-REFERENCE TO RELATED APPLICATIONS

[0001] This application claims the benefit of U.S. Provisional Patent Application Nos. 63/486,652, 63/486,653, and 63/486,654, all of which were filed on Feb. 23, 2023, and the entire contents of each of which are incorporated herein by reference.

### REFERENCE TO AN ELECTRONIC SEQUENCE LISTING

[0002] The contents of the electronic sequence listing (185952001040SEQLIST.xml; Size: 3,250,395 bytes; and Date of Creation: Feb. 7, 2024) is herein incorporated by reference in its entirety.

### FIELD OF INVENTION

[0003] The present invention relates to methods of expressing and purifying peptides from inclusion bodies.

### BACKGROUND

[0004] Although short peptides can be produced in high yields via chemical synthesis (Merrifield, R. B., (1993) J. Am. Chem. Soc. 85:2149-2154), recombinant production offers the potential for large scale production at a more reasonable cost. However, the bioproduction of short peptides present particular challenges. Peptides shorter than 30 amino acids in length are usually unstructured, and are thus difficult to express alone by recombinant DNA technologies in microbial cultures. Short peptide production by recombinant means is further complicated by potential toxicity to the host cell or by their high susceptibility to in vivo proteolysis, which leads to low, if any, yield of the peptides (Gottesman, S. (1990) Methods in Enzymology 185:119-129; Goff and Goldberg, (1986) in Maximizing Gene Expression p 287-314). Though the fusion of short peptides to larger carrier proteins can help to reduce toxicity, provide stability, and aid in purification (Terpe, K. (2003) Appl. Microbiol. Biotechnol. 60:523-533), even when the peptide is part of a larger fusion protein, high concentrations of fusion peptide in a cell can lead to toxic effects.

[0005] The use of an insoluble carrier protein as a fusion partner can help mitigate the toxicity and proteolytic degradation of the peptides by promoting their aggregation into insoluble inclusion bodies. Inclusion bodies protect against proteolysis and serve as a purification substrate (T. Kempe et al., (1985) Gene 39:239-245). However, common methods for separating peptides from the carrier protein can be inefficient and generally requires costly cleavage reagents and affinity columns for purification. For example, protease-based recovery using site-specific proteases or autoprotease fusion partners to separate the peptides from the carrier protein has been used with moderate success, but these strategies require large peptide fusions and are not compatible with concatemeric peptide production strategies.

[0006] Peptide production methods using onconase as an insoluble carrier protein have been developed and present a potential strategy to produce peptides in bacteria or yeast. One of these onconase-based strategies was recently described by Pane, K., et al. (2016) PLoS One. 11(1):e0146552 (“Pane, et al.”). Pane et al. used an onconase-peptide fusion construct to express and purify peptides from inclusion bodies in E. coli. Separation of the peptides from the onconase was performed using a chemical cleavage strategy, which can be performed using low-cost reagents and generally targets peptide bonds present at low frequency in proteins. Notably, though the protocol described by Pane et al. required the use of chaotropic agents but precluded the use of a chromatographic step. The protocol still resulted in low peptide yield and purity, which can potentially compromise downstream applications of peptides produced by this method.

[0007] Thus, there remains a need for methods of production of short peptides that avoid toxicity and proteolytic degradation, as well as allow for simple, inexpensive and efficient recovery of the peptides.

### SUMMARY OF INVENTION

[0008] Aspect 1: A method of producing oligopeptides comprising:
[0009] expressing a fusion polypeptide comprising an insoluble carrier polypeptide operably linked to two or more oligopeptides by a peptide bond, and
[0010] releasing the two or more oligopeptides from the insoluble carrier polypeptide by sequence-specific chemical cleavage of the peptide bond.

[0011] Aspect 2: The method of Aspect 1, wherein the insoluble carrier polypeptide comprises an onconase polypeptide.

[0012] Aspect 3: The method of Aspect 1, wherein the insoluble carrier polypeptide comprises a TAF12 polypeptide.

[0013] Aspect 4: The method of Aspect 1, wherein the insoluble carrier polypeptide comprises a trpΔLE polypeptide, a ketosteroid isomerase (KSI) polypeptide, a β-galactosidase polypeptide, a PagP polypeptide, a truncated E. coli PurF F4 fragment polypeptide, a Pseudomonas aeruginosa PaP3.30 polypeptide, a histone fold domain of the human transcription factor TAF12 (TAF12-HFD) polypeptide, a cleavable self-aggregating tag INTEIN-ELK16, a E. coli maltose-binding protein, an E. coli RNAse II polypeptide, an E. coli alkaline phosphatase polypeptide, an E. coli phospholipase A polypeptide, an E. coli D-lactamase polypeptide, a Salmonella typhimurium MalK protein, a Clostridium thermocellum endoglucanase D polypeptide, a Bacillus thuringiensis subsp. aizawai IPL7 insecticidal proteins, a human procathepsin B polypeptide, a porcine interferon-γ polypeptide, a T5 DNA polymerase polypeptide, and an E. coli thioredoxin polypeptide.

[0014] Aspect 5. The method of any one of Aspects 1-4, wherein the fusion polypeptide comprises three or more oligopeptides, four or more oligopeptides, five or more oligopeptides, six or more oligopeptides, eight or more oligopeptides, ten or more oligopeptides, fifteen or more oligopeptides, twenty or more oligopeptides.

[0015] Aspect 6: The method of any one of Aspects 1-5, wherein the two or more oligopeptides are different.

[0016] Aspect 7: The method of any one of Aspects 1-6, wherein all the oligopeptides are operably linked to the N-terminus of the insoluble carrier polypeptide or all the oligopeptides are operably linked to the C-terminus of the insoluble carrier polypeptide.

[0017] Aspect 8: The method of any one of Aspects 1-6, wherein at least one oligopeptide is operably linked to the N-terminus of the insoluble carrier polypeptide and at least one oligopeptide is operably linked to the C-terminus of the insoluble carrier polypeptide.

[0018] Aspect 9. The method of Aspect 8, wherein the fusion polypeptide comprises two or more oligopeptides, three or more oligopeptides, four or more oligopeptides, five or more oligopeptides, six or more oligopeptides, eight or more oligopeptides, ten or more oligopeptides operably linked to the N-terminus of the insoluble carrier polypeptide and/or two or more oligopeptides, three or more oligopeptides, four or more oligopeptides, five or more oligopeptides, six or more oligopeptides, eight or more oligopeptides, ten or more oligopeptides operably linked to the C-terminus of the insoluble carrier polypeptide.

[0019] Aspect 10: The method of any one of Aspects 1-9, wherein the peptide bond comprises (i) a methionine and the sequence-specific chemical cleavage is with cyanogen bromide, (ii) a tryptophan and the sequence-specific chemical cleavage is with BNPS-skatole, (iii) an aspartic acid-proline (Asp-Pro) bond and the sequence-specific chemical cleavage is with formic acid, (iv) an asparagine-glycine bond and the sequence-specific chemical cleavage is with hydroxylamine, or (v) a cysteine and the sequence-specific chemical cleavage is with NTCB.

[0020] Aspect 11: The method of any one of Aspects 1-9, wherein the peptide bond comprises an Asp-Pro bond and the sequence-specific chemical cleavage is with acetic acid.

[0021] Aspect 12: The method of any one of Aspects 1-11, wherein the oligopeptides are operably linked by the peptide bond and are released from each other when the oligopeptides are released from the insoluble carrier polypeptide.

[0022] Aspect 13: The method of any one of Aspects 1-11, wherein the oligopeptides are operably linked by a different peptide bond and are released from each other by sequence-specific chemical cleavage of the different peptide bond after the oligopeptides are released from the insoluble carrier polypeptide.

[0023] Aspect 14: The method of Aspect 13, wherein the different peptide bond comprises (i) a methionine and the sequence-specific chemical cleavage is with cyanogen bromide, (ii) a tryptophan and the sequence-specific chemical cleavage is with BNPS-skatole, (iii) an aspartic acid-proline (Asp-Pro) bond and the sequence-specific chemical cleavage is with formic acid, (iv) an asparagine-glycine bond and the sequence-specific chemical cleavage is with hydroxylamine, or (v) a cysteine and the sequence-specific chemical cleavage is with NTCB.

[0024] Aspect 15: The method of Aspect 13, wherein the different peptide bond comprises an Asp-Pro bond and the sequence-specific chemical cleavage is with acetic acid.

[0025] Aspect 16: The method of any one of Aspects 1-15, wherein the oligopeptides are at least four amino acids long, at least five amino acids long, at least six amino acids long, at least seven amino acids long, at least eight amino acids long, at least nine amino acids long, at least ten amino acids long, at least fifteen amino acids long, at least twenty amino acids long, or at least twenty-five amino acids long.

[0026] Aspect 17: The method of any one of Aspects 1-16, wherein the oligopeptides are less than fifty amino acids long, less than forty-five amino acids long, less than forty amino acids long, less than thirty-five amino acids long, less than thirty amino acids long, less than twenty-five amino acids long, or less than twenty amino acids long.

[0027] Aspect 18: The method of any one of Aspects 1-15, wherein the oligopeptides are between four amino acids long and fifty amino acids long, between six amino acids long and forty amino acids long, between six amino acids long and thirty amino acids long, or between eight amino acids long and twenty-five amino acids long.

[0028] Aspect 19: The method of any one of Aspect 1-18, wherein the fusion peptide is expressed in bacteria or yeast.

[0029] Aspect 20: The method of Aspect 19, wherein the bacteria is E. coli or Vibrio natriegens

[0030] Aspect 21: The method of Aspect 19 or Aspect 20, wherein the yield of released oligopeptide is at least 10 mg/L of bacterial culture, at least 20 mg/L of bacterial culture, at least 30 mg/L of bacterial culture, at least 40 mg/L of bacterial culture, at least 50 mg/L of bacterial culture, at least 1 g/L or at least 5 g/L.

[0031] Aspect 22: A fusion polypeptide comprising an insoluble carrier polypeptide operably linked to two or more oligopeptides, wherein the operably linkage between the two or more oligopeptides and the insoluble carrier polypeptide comprise a peptide bond that is capable of sequence-specific chemical cleavage.

[0032] Aspect 23: The fusion polypeptide of Aspect 22, wherein the insoluble carrier polypeptide comprises an onconase polypeptide.

[0033] Aspect 24: The fusion polypeptide of Aspect 22, wherein the insoluble carrier polypeptide comprises a TAF12 polypeptide.

[0034] Aspect 25: The fusion polypeptide of Aspect 22, wherein the insoluble carrier polypeptide comprises a trpΔLE polypeptide, a ketosteroid isomerase (KSI) polypeptide, a β-galactosidase polypeptide, a PagP polypeptide, a truncated E. coli PurF F4 fragment polypeptide, a Pseudomonas aeruginosa PaP3.30 polypeptide, a histone fold domain of the human transcription factor TAF12 (TAF12-HFD) polypeptide, a cleavable self-aggregating tag INTEIN-ELK16, a E. coli maltose-binding protein, an E. coli RNAse II polypeptide, an E. coli alkaline phosphatase polypeptide, an E. coli phospholipase A polypeptide, an E. coli β-lactamase polypeptide, a Salmonella typhimurium MalK protein, a Clostridium thermocellum endoglucanase D polypeptide, a Bacillus thuringiensis subsp. aizawai IPL7 insecticidal proteins, a human procathepsin B polypeptide, a porcine interferon-γ polypeptide, a T5 DNA polymerase polypeptide, and an E. coli thioredoxin polypeptide.

[0035] Aspect 26. The fusion polypeptide of any one of Aspects 22-25, wherein the fusion polypeptide comprises three or more oligopeptides, four or more oligopeptides, five or more oligopeptides, six or more oligopeptides, eight or more oligopeptides, ten or more oligopeptides, fifteen or more oligopeptides, twenty or more oligopeptides.

[0036] Aspect 27: The fusion polypeptide of any one of Aspects 22-26, wherein the two or more oligopeptides are different.

[0037] Aspect 28: The fusion polypeptide of any one of Aspects 22-27, wherein all the oligopeptides are operably linked to the N-terminus of the insoluble carrier polypeptide or all the oligopeptides are operably linked to the C-terminus of the insoluble carrier polypeptide.

[0038] Aspect 29: The fusion polypeptide of any one of Aspects 22-27, wherein at least one oligopeptide is operably linked to the N-terminus of the insoluble carrier polypeptide and at least one oligopeptide is operably linked to the C-terminus of the insoluble carrier polypeptide.

[0039] Aspect 30. The fusion polypeptide of Aspect 29, wherein the fusion polypeptide comprises two or more oligopeptides, three or more oligopeptides, four or more oligopeptides, five or more oligopeptides, six or more oligopeptides, eight or more oligopeptides, ten or more oligopeptides operably linked to the N-terminus of the insoluble carrier polypeptide and/or two or more oligopeptides, three or more oligopeptides, four or more oligopeptides, five or more oligopeptides, six or more oligopeptides, eight or more oligopeptides, ten or more oligopeptides operably linked to the C-terminus of the insoluble carrier polypeptide.

[0040] Aspect 31: The fusion polypeptide of any one of Aspects 22-30, wherein the peptide bond comprises (i) a methionine and the sequence-specific chemical cleavage is with cyanogen bromide, (ii) a tryptophan and the sequence-specific chemical cleavage is with BNPS-skatole, (iii) an aspartic acid-proline (Asp-Pro) bond and the sequence-specific chemical cleavage is with formic acid, (iv) an asparagine-glycine bond and the sequence-specific chemical cleavage is with hydroxylamine, or (v) a cysteine and the sequence-specific chemical cleavage is with NTCB.

[0041] Aspect 32: The fusion polypeptide of any one of Aspects 22-30, wherein the peptide bond comprises an Asp-Pro bond and the sequence-specific chemical cleavage is with acetic acid.

[0042] Aspect 33: The fusion polypeptide of any one of Aspects 22-32, wherein the oligopeptides are operably linked by the peptide bond and are capable of release from each other with the sequence-specific chemical cleavage.

[0043] Aspect 34: The fusion polypeptide of any one of Aspects 22-32, wherein the oligopeptides are operably linked by a different peptide bond and are capable of release from each other by a different sequence-specific chemical cleavage.

[0044] Aspect 35: The fusion polypeptide of Aspect 34, wherein the different peptide bond comprises (i) a methionine and the different sequence-specific chemical cleavage is with cyanogen bromide, (ii) a tryptophan and the different sequence-specific chemical cleavage is with BNPS-skatole, (iii) an aspartic acid-proline (Asp-Pro) bond and the different sequence-specific chemical cleavage is with formic acid, (iv) an asparagine-glycine bond and the different sequence-specific chemical cleavage is with hydroxylamine, or (v) a cysteine and the different sequence-specific chemical cleavage is with NTCB.

[0045] Aspect 36: The fusion polypeptide of Aspect 34, wherein the different peptide bond comprises an Asp-Pro bond and the different sequence-specific chemical cleavage is with acetic acid.

[0046] Aspect 37: The fusion polypeptide of any one of Aspects 22-36, wherein the oligopeptides are at least four amino acids long, at least five amino acids long, at least six amino acids long, at least seven amino acids long, at least eight amino acids long, at least nine amino acids long, at least ten amino acids long, at least fifteen amino acids long, at least twenty amino acids long, or at least twenty-five amino acids long.

[0047] Aspect 38: The fusion polypeptide of any one of Aspects 22-37, wherein the oligopeptides are less than fifty amino acids long, less than forty-five amino acids long, less than forty amino acids long, less than thirty-five amino acids long, less than thirty amino acids long, less than twenty-five amino acids long, or less than twenty amino acids long.

[0048] Aspect 39: The fusion polypeptide of any one of Aspects 22-36, wherein the oligopeptides are between four amino acids long and fifty amino acids long, between six amino acids long and forty amino acids long, between six amino acids long and thirty amino acids long, or between eight amino acids long and twenty-five amino acids long.

[0049] Aspect 40: A method of releasing an oligopeptide fused to an insoluble carrier polypeptide, which forms inclusion bodies in a cell comprising
[0050] a) expressing a fusion polypeptide comprising the oligopeptide operably linked to the insoluble carrier polypeptide, wherein the operable linkage is a peptide bond that is capable of sequence-specific chemical cleavage by acetic acid,
[0051] b) purifying the inclusion bodies, and
[0052] c) incubating the inclusion bodies with acid at a temperature of greater than 50° C. for at least one hour, wherein the oligopeptide is released from the fusion polypeptide by sequence-specific cleavage of the peptide bond.

[0053] Aspect 41: The method of Aspect 40, wherein the insoluble carrier polypeptide comprises an onconase polypeptide.

[0054] Aspect 42: The method of Aspect 40, wherein the insoluble carrier polypeptide comprises a TAF12 polypeptide.

[0055] Aspect 43: The method of Aspect 40, wherein the insoluble carrier polypeptide comprises a trpΔLE polypeptide, a ketosteroid isomerase (KSI) polypeptide, a β-galactosidase polypeptide, a PagP polypeptide, a truncated E. coli PurF F4 fragment polypeptide, a Pseudomonas aeruginosa PaP3.30 polypeptide, a histone fold domain of the human transcription factor TAF12 (TAF12-HFD) polypeptide, a cleavable self-aggregating tag INTEIN-ELK16, a E. coli maltose-binding protein, an E. coli RNAse II polypeptide, an E. coli alkaline phosphatase polypeptide, an E. coli phospholipase A polypeptide, an E. coli β-lactamase polypeptide, a Salmonella typhimurium MalK protein, a Clostridium thermocellum endoglucanase D polypeptide, a Bacillus thuringiensis subsp. aizawai IPL7 insecticidal proteins, a human procathepsin B polypeptide, a porcine interferon-γ polypeptide, a T5 DNA polymerase polypeptide, and an E. coli thioredoxin polypeptide.

[0056] Aspect 44: The method of any one of Aspects 40-43, wherein the temperature of step c) is greater than 60° C., greater than 70° C., greater than 80° C., or greater than 90° C.

[0057] Aspect 45: The method of any one of Aspects 40-44, wherein the temperature of step c) is less than 100° C., less than 95° C., less than 90° C., or less than 85° C.

[0058] Aspect 46: The method of any one of Aspects 40-45, wherein the pH in step c) is below 3.0.

[0059] Aspect 47: The method of any one of Aspects 40-45, wherein the pH in step c) is from 2.6 to 2.8.

[0060] Aspect 48: The method of any one of Aspects 40-47, wherein the acid is a strong acid optionally selected from hydrochloric acid and sulfuric acid.

[0061] Aspect 49: The method of any one of Aspects 40-47, wherein the acid is a weak acid.

[0062] Aspect 50: The method of Aspect 49, wherein the weak acid is acetic acid.

[0063] Aspect 51: The method of Aspect 50, wherein the acetic acid concentration is at least two percent by weight, at least three percent by weight, at least four percent by weight, or at least five percent by weight.

[0064] Aspect 52: The method of Aspect 50 or Aspect 51, wherein the acetic acid concentration is less than fifty percent by weight, less than forty-five percent by weight, less than forty percent by weight, less than thirty-five percent by weight, or less than thirty percent by weight.

[0065] Aspect 53: The method of any one of Aspects 40-52, wherein the insoluble carrier polypeptide is solubilized by the incubating of step c).

[0066] Aspect 54: The method of any one of Aspects 40-52, wherein the insoluble carrier polypeptide is not solubilized by the incubating of step c).

[0067] Aspect 55. The method of any one of Aspects 40-54, wherein the fusion polypeptide comprises three or more oligopeptides, four or more oligopeptides, five or more oligopeptides, six or more oligopeptides, eight or more oligopeptides, ten or more oligopeptides, fifteen or more oligopeptides, twenty or more oligopeptides.

[0068] Aspect 56: The method of any one of Aspects 40-55, wherein the two or more oligopeptides are different.

[0069] Aspect 57: The method of any one of Aspects 40-56, wherein all the oligopeptides are operably linked to the N-terminus of the insoluble carrier polypeptide or all the oligopeptides are operably linked to the C-terminus of the insoluble carrier polypeptide.

[0070] Aspect 58: The method of any one of Aspects 40-56, wherein at least one oligopeptide is operably linked to the N-terminus of the insoluble carrier polypeptide and at least one oligopeptide is operably linked to the C-terminus of the insoluble carrier polypeptide.

[0071] Aspect 59. The method of Aspect 58, wherein the fusion polypeptide comprises two or more oligopeptides, three or more oligopeptides, four or more oligopeptides, five or more oligopeptides, six or more oligopeptides, eight or more oligopeptides, ten or more oligopeptides operably linked to the N-terminus of the insoluble carrier polypeptide and/or two or more oligopeptides, three or more oligopeptides, four or more oligopeptides, five or more oligopeptides, six or more oligopeptides, eight or more oligopeptides, ten or more oligopeptides operably linked to the C-terminus of the insoluble carrier polypeptide.

[0072] Aspect 60: The method of any one of Aspects 40-59, wherein the peptide bond comprises (i) a methionine and the sequence-specific chemical cleavage is with cyanogen bromide, (ii) a tryptophan and the sequence-specific chemical cleavage is with BNPS-skatole, (iii) an aspartic acid-proline (Asp-Pro) bond and the sequence-specific chemical cleavage is with formic acid, (iv) an asparagine-glycine bond and the sequence-specific chemical cleavage is with hydroxylamine, or (v) a cysteine and the sequence-specific chemical cleavage is with NTCB.

[0073] Aspect 61: The method of any one of Aspects 40-60, wherein the peptide bond comprises an Asp-Pro bond and the sequence-specific chemical cleavage is acid cleavage.

[0074] Aspect 62: The method of any one of Aspects 40-61, wherein the oligopeptides are operably linked by the peptide bond and are released from each other when the oligopeptides are released from the insoluble carrier polypeptide.

[0075] Aspect 63: The method of any one of Aspects 40-62, wherein the oligopeptides are operably linked by a different peptide bond and are released from each other by sequence-specific chemical cleavage of the different peptide bond after the oligopeptides are released from the insoluble carrier polypeptide.

[0076] Aspect 64: The method of Aspect 63, wherein the different peptide bond comprises (i) a methionine and the sequence-specific chemical cleavage is with cyanogen bromide, (ii) a tryptophan and the sequence-specific chemical cleavage is with BNPS-skatole, (iii) an aspartic acid-proline (Asp-Pro) bond and the sequence-specific chemical cleavage is with formic acid, (iv) an asparagine-glycine bond and the sequence-specific chemical cleavage is with hydroxylamine, or (v) a cysteine and the sequence-specific chemical cleavage is with NTCB.

[0077] Aspect 65: The method of Aspect 64, wherein the different peptide bond comprises an Asp-Pro bond and the sequence-specific chemical cleavage is acid cleavage.

[0078] Aspect 66: The method of any one of Aspects 40-65, wherein the oligopeptides are at least four amino acids long, at least five amino acids long, at least six amino acids long, at least seven amino acids long, at least eight amino acids long, at least nine amino acids long, at least ten amino acids long, at least fifteen amino acids long, at least twenty amino acids long, or at least twenty-five amino acids long.

[0079] Aspect 67: The method of any one of Aspects 40-66, wherein the oligopeptides are less than fifty amino acids long, less than forty-five amino acids long, less than forty amino acids long, less than thirty-five amino acids long, less than thirty amino acids long, less than twenty-five amino acids long, or less than twenty amino acids long.

[0080] Aspect 68: The method of any one of Aspects 40-65, wherein the oligopeptides are between four amino acids long and fifty amino acids long, between six amino acids long and forty amino acids long, between six amino acids long and thirty amino acids long, or between eight amino acids long and twenty-five amino acids long.

[0081] Aspect 69: The method of any one of Aspect 40-68, wherein the fusion peptide is expressed in bacteria or yeast.

[0082] Aspect 70: The method of Aspect 69, wherein the bacteria is E. coli or Vibrio natriegens

[0083] Aspect 71: A method of purifying inclusion bodies comprising a fusion protein comprising
[0084] a) expressing a fusion protein comprising an oligopeptide operably linked to an insoluble carrier polypeptide, which forms inclusion bodies in a cell, wherein the operable linkage is a chemically cleavable amino acid sequence,
[0085] b) lysing the cell to form a cell lysate,
[0086] c) centrifuging the cell lysate to form a pellet,
[0087] d) washing the pellet in a surfactant buffer comprising a nonionic surfactant at least once, at least twice, or at least three times,
[0088] e) washing the pellet in a salt buffer comprising at least 0.5M NaCl at least once, at least twice, or at least three times, and
[0089] f) washing the pellet in water at least once, at least twice, or at least three times, and thereby producing purified inclusion bodies.

[0090] Aspect 72: The method of Aspect 71, wherein the insoluble carrier polypeptide comprises a TAF12 polypeptide.

[0091] Aspect 73: The method of Aspect 71, wherein the insoluble carrier polypeptide comprises an onconase polypeptide.

[0092] Aspect 74: The method of Aspect 71, wherein the insoluble carrier polypeptide comprises a trpΔLE polypeptide, a ketosteroid isomerase (KSI) polypeptide, a β-galactosidase polypeptide, a PagP polypeptide, a truncated E. coli PurF F4 fragment polypeptide, a Pseudomonas aeruginosa PaP3.30 polypeptide, a histone fold domain of the human transcription factor TAF12 (TAF12-HFD) polypeptide, a cleavable self-aggregating tag INTEIN-ELK16, a E. coli maltose-binding protein, an E. coli RNAse II polypeptide, an E. coli alkaline phosphatase polypeptide, an E. coli phospholipase A polypeptide, an E. coli β-lactamase polypeptide, a Salmonella typhimurium MalK protein, a Clostridium thermocellum endoglucanase D polypeptide, a Bacillus thuringiensis subsp. aizawai IPL7 insecticidal proteins, a human procathepsin B polypeptide, a porcine interferon-γ polypeptide, a T5 DNA polymerase polypeptide, and an E. coli thioredoxin polypeptide.

[0093] Aspect 75: The method of any one of Aspects 71-74, wherein the salt buffer is at least 0.6M NaCl, at least 0.7M NaCl, or at least 0.75M NaCl.

[0094] Aspect 76. The method of any one of Aspects 71-75, wherein the fusion polypeptide comprises three or more oligopeptides, four or more oligopeptides, five or more oligopeptides, six or more oligopeptides, eight or more oligopeptides, ten or more oligopeptides, fifteen or more oligopeptides, twenty or more oligopeptides.

[0095] Aspect 77: The method of any one of Aspects 71-76, wherein the two or more oligopeptides are different.

[0096] Aspect 78: The method of any one of Aspects 71-77, wherein all the oligopeptides are operably linked to the N-terminus of the insoluble carrier polypeptide or all the oligopeptides are operably linked to the C-terminus of the insoluble carrier polypeptide.

[0097] Aspect 79: The method of any one of Aspects 71-77, wherein at least one oligopeptide is operably linked to the N-terminus of the insoluble carrier polypeptide and at least one oligopeptide is operably linked to the C-terminus of the insoluble carrier polypeptide.

[0098] Aspect 80. The method of Aspect 79, wherein the fusion polypeptide comprises two or more oligopeptides, three or more oligopeptides, four or more oligopeptides, five or more oligopeptides, six or more oligopeptides, eight or more oligopeptides, ten or more oligopeptides operably linked to the N-terminus of the insoluble carrier polypeptide and/or two or more oligopeptides, three or more oligopeptides, four or more oligopeptides, five or more oligopeptides, six or more oligopeptides, eight or more oligopeptides, ten or more oligopeptides operably linked to the C-terminus of the insoluble carrier polypeptide.

[0099] Aspect 81: The method of any one of Aspects 71-80, wherein the peptide bond comprises (i) a methionine and the sequence-specific chemical cleavage is with cyanogen bromide, (ii) a tryptophan and the sequence-specific chemical cleavage is with BNPS-skatole, (iii) an aspartic acid-proline (Asp-Pro) bond and the sequence-specific chemical cleavage is with formic acid, (iv) an asparagine-glycine bond and the sequence-specific chemical cleavage is with hydroxylamine, or (v) a cysteine and the sequence-specific chemical cleavage is with NTCB.

[0100] Aspect 82: The method of any one of Aspects 71-80, wherein the peptide bond comprises an Asp-Pro bond and the sequence-specific chemical cleavage is acid cleavage.

[0101] Aspect 83: The method of any one of Aspects 71-82, wherein the oligopeptides are operably linked by the peptide bond and are released from each other when the oligopeptides are released from the insoluble carrier polypeptide.

[0102] Aspect 84: The method of any one of Aspects 71-82, wherein the oligopeptides are operably linked by a different peptide bond and are released from each other by sequence-specific chemical cleavage of the different peptide bond after the oligopeptides are released from the insoluble carrier polypeptide.

[0103] Aspect 85: The method of Aspect 84, wherein the different peptide bond comprises (i) a methionine and the sequence-specific chemical cleavage is with cyanogen bromide, (ii) a tryptophan and the sequence-specific chemical cleavage is with BNPS-skatole, (iii) an aspartic acid-proline (Asp-Pro) bond and the sequence-specific chemical cleavage is with formic acid, (iv) an asparagine-glycine bond and the sequence-specific chemical cleavage is with hydroxylamine, or (v) a cysteine and the sequence-specific chemical cleavage is with NTCB.

[0104] Aspect 86: The method of Aspect 84, wherein the different peptide bond comprises an Asp-Pro bond and the sequence-specific chemical cleavage is with acetic acid.

[0105] Aspect 87: The method of any one of Aspects 71-86, wherein the oligopeptides are at least four amino acids long, at least five amino acids long, at least six amino acids long, at least seven amino acids long, at least eight amino acids long, at least nine amino acids long, at least ten amino acids long, at least fifteen amino acids long, at least twenty amino acids long, or at least twenty-five amino acids long.

[0106] Aspect 88: The method of any one of Aspects 71-87, wherein the oligopeptides are less than fifty amino acids long, less than forty-five amino acids long, less than forty amino acids long, less than thirty-five amino acids long, less than thirty amino acids long, less than twenty-five amino acids long, or less than twenty amino acids long.

[0107] Aspect 89: The method of any one of Aspects 71-86, wherein the oligopeptides are between four amino acids long and fifty amino acids long, between six amino acids long and forty amino acids long, between six amino acids long and thirty amino acids long, or between eight amino acids long and twenty-five amino acids long.

[0108] Aspect 90: The method of any one of Aspect 71-89, wherein the fusion peptide is expressed in bacteria or yeast.

[0109] Aspect 91: The method of Aspect 90, wherein the bacteria is E. coli or Vibrio natriegens

[0110] Aspect 92: A method of producing a fusion polypeptide comprising expressing the fusion polypeptide comprising an oligopeptide operably linked to the C-terminus of an onconase polypeptide, wherein the onconase polypeptide comprises one or more amino acid substitutions in the 11 N-terminal amino acids as compared to SEQ ID NO: 1, wherein the onconase-oligopeptide fusion protein comprising the onconase polypeptide is expressed at a higher level than a fusion protein comprising an onconase of SEQ ID NO: 1 when expressed under the same conditions.

[0111] Aspect 93: The method of Aspect 92, wherein the fusion polypeptide comprises three or more oligopeptides, four or more oligopeptides, five or more oligopeptides, six or more oligopeptides, eight or more oligopeptides, ten or more oligopeptides, fifteen or more oligopeptides, twenty or more oligopeptides.

[0112] Aspect 94: The method of Aspect 92 or Aspect 93, wherein the two or more oligopeptides are different.

[0113] Aspect 95: The method of any one of Aspects 92-94, wherein all the oligopeptides are operably linked to the N-terminus of the onconase polypeptide or all the oligopeptides are operably linked to the C-terminus of the onconase polypeptide.

[0114] Aspect 96: The method of any one of Aspects 92-94, wherein at least one oligopeptide is operably linked to the N-terminus of the onconase polypeptide and at least one oligopeptide is operably linked to the C-terminus of the onconase polypeptide.

[0115] Aspect 97. The method of Aspect 96, wherein the fusion polypeptide comprises two or more oligopeptides, three or more oligopeptides, four or more oligopeptides, five or more oligopeptides, six or more oligopeptides, eight or more oligopeptides, ten or more oligopeptides operably linked to the N-terminus of the onconase polypeptide and/or two or more oligopeptides, three or more oligopeptides, four or more oligopeptides, five or more oligopeptides, six or more oligopeptides, eight or more oligopeptides, ten or more oligopeptides operably linked to the C-terminus of the onconase polypeptide.

[0116] Aspect 98: The method of any one of Aspects 92-97, wherein the peptide bond comprises (i) a methionine and the sequence-specific chemical cleavage is with cyanogen bromide, (ii) a tryptophan and the sequence-specific chemical cleavage is with BNPS-skatole, (iii) an aspartic acid-proline (Asp-Pro) bond and the sequence-specific chemical cleavage is with formic acid, (iv) an asparagine-glycine bond and the sequence-specific chemical cleavage is with hydroxylamine, or (v) a cysteine and the sequence-specific chemical cleavage is with NTCB.

[0117] Aspect 99: The method of any one of Aspects 92-97, wherein the peptide bond comprises an Asp-Pro bond and the sequence-specific chemical cleavage is with acetic acid.

[0118] Aspect 100: The method of any one of Aspects 92-99, wherein the oligopeptides are operably linked by the peptide bond and are released from each other when the oligopeptides are released from the onconase.

[0119] Aspect 101: The method of any one of Aspects 92-99, wherein the oligopeptides are operably linked by a different peptide bond and are released from each other by sequence-specific chemical cleavage of the different peptide bond after the oligopeptides are released from the onconase.

[0120] Aspect 102: The method of Aspect 101, wherein the different peptide bond comprises (i) a methionine and the sequence-specific chemical cleavage is with cyanogen bromide, (ii) a tryptophan and the sequence-specific chemical cleavage is with BNPS-skatole, (iii) an aspartic acid-proline (Asp-Pro) bond and the sequence-specific chemical cleavage is with formic acid, (iv) an asparagine-glycine bond and the sequence-specific chemical cleavage is with hydroxylamine, or (v) a cysteine and the sequence-specific chemical cleavage is with NTCB.

[0121] Aspect 103: The method of Aspect 101, wherein the different peptide bond comprises an Asp-Pro bond and the sequence-specific chemical cleavage is acid cleavage.

[0122] Aspect 104: The method of any one of Aspects 92-103, wherein the oligopeptides are at least four amino acids long, at least five amino acids long, at least six amino acids long, at least seven amino acids long, at least eight amino acids long, at least nine amino acids long, at least ten amino acids long, at least fifteen amino acids long, at least twenty amino acids long, or at least twenty-five amino acids long.

[0123] Aspect 105: The method of any one of Aspects 92-104, wherein the oligopeptides are less than fifty amino acids long, less than forty-five amino acids long, less than forty amino acids long, less than thirty-five amino acids long, less than thirty amino acids long, less than twenty-five amino acids long, or less than twenty amino acids long.

[0124] Aspect 106: The method of any one of Aspects 92-103, wherein the oligopeptides are between four amino acids long and fifty amino acids long, between six amino acids long and forty amino acids long, between six amino acids long and thirty amino acids long, or between eight amino acids long and twenty-five amino acids long.

[0125] Aspect 107: The method of any one of Aspect 92-106, wherein the fusion peptide is expressed in bacteria or yeast.

[0126] Aspect 108: The method of Aspect 107, wherein the bacteria is E. coli or Vibrio natriegens

[0127] Aspect 109: An onconase polypeptide comprising one or more amino acid substitutions in the 11 N-terminal amino acids of the onconase polypeptide as compared to SEQ ID NO: 1, wherein the onconase polypeptide is expressed at a higher level than an onconase protein of SEQ ID NO: 1 when expressed under the same conditions.

[0128] Aspect 110: The onconase polypeptide of Aspect 109, wherein the onconase polypeptide comprises the amino acid sequence of one of SEQ ID NOs: 2-10 and 15-22, optionally with one, two, three, four, five or all six C-terminal histidine residues deleted as shown in FIG. 20A.

[0129] Aspect 111: A fusion polypeptide comprising an onconase polypeptide operably linked to one or more oligopeptides, wherein the operably linkage between the one or more oligopeptides and the onconase polypeptide comprise a peptide bond that is capable of sequence-specific chemical cleavage, wherein the onconase polypeptide comprises one or more amino acid substitutions in the 11 N-terminal amino acids of the onconase polypeptide as compared to SEQ ID NO: 1, wherein the onconase polypeptide is expressed at a higher level than an onconase protein of SEQ ID NO: 1 when expressed under the same conditions.

[0130] Aspect 112: The fusion polypeptide of Aspect 111, wherein the onconase polypeptide comprises the amino acid sequence of one of SEQ ID NOs: 2-10 and 15-22, optionally with one, two, three, four, five or all six C-terminal histidine residues deleted as shown in FIG. 20A.

[0131] Aspect 113. The fusion polypeptide of Aspect 111 or Aspect 112, wherein the fusion polypeptide comprises three or more oligopeptides, four or more oligopeptides, five or more oligopeptides, six or more oligopeptides, eight or more oligopeptides, ten or more oligopeptides, fifteen or more oligopeptides, twenty or more oligopeptides.

[0132] Aspect 114: The fusion polypeptide of any one of Aspects 111-113, wherein the two or more oligopeptides are different.

[0133] Aspect 115: The fusion polypeptide of any one of Aspects 111-114, wherein all the oligopeptides are operably linked to the N-terminus of the onconase polypeptide or all the oligopeptides are operably linked to the C-terminus of the onconase polypeptide.

[0134] Aspect 116: The fusion polypeptide of any one of Aspects 111-114, wherein at least one oligopeptide is operably linked to the N-terminus of the onconase polypeptide and at least one oligopeptide is operably linked to the C-terminus of the onconase polypeptide.

[0135] Aspect 117. The fusion polypeptide of Aspect 116, wherein the fusion polypeptide comprises two or more oligopeptides, three or more oligopeptides, four or more oligopeptides, five or more oligopeptides, six or more oligopeptides, eight or more oligopeptides, ten or more oligopeptides operably linked to the N-terminus of the onconase polypeptide and/or two or more oligopeptides, three or more oligopeptides, four or more oligopeptides, five or more oligopeptides, six or more oligopeptides, eight or more oligopeptides, ten or more oligopeptides operably linked to the C-terminus of the onconase polypeptide.

[0136] Aspect 118: The fusion polypeptide of any one of Aspects 111-117, wherein the peptide bond comprises (i) a methionine and the sequence-specific chemical cleavage is with cyanogen bromide, (ii) a tryptophan and the sequence-specific chemical cleavage is with BNPS-skatole, (iii) an aspartic acid-proline (Asp-Pro) bond and the sequence-specific chemical cleavage is with formic acid, (iv) an asparagine-glycine bond and the sequence-specific chemical cleavage is with hydroxylamine, or (v) a cysteine and the sequence-specific chemical cleavage is with NTCB.

[0137] Aspect 119: The fusion polypeptide of any one of Aspects 111-117, wherein the peptide bond comprises an Asp-Pro bond and the sequence-specific chemical cleavage is acid cleavage.

[0138] Aspect 120: The fusion polypeptide of any one of Aspects 111-119, wherein the oligopeptides are operably linked by the peptide bond and are capable of release from each other with the sequence-specific chemical cleavage.

[0139] Aspect 121: The fusion polypeptide of any one of Aspects 105-119, wherein the oligopeptides are operably linked by a different peptide bond and are capable of release from each other by a different sequence-specific chemical cleavage.

[0140] Aspect 122: The fusion polypeptide of Aspect 121, wherein the different peptide bond comprises (i) a methionine and the different sequence-specific chemical cleavage is with cyanogen bromide, (ii) a tryptophan and the different sequence-specific chemical cleavage is with BNPS-skatole, (iii) an aspartic acid-proline (Asp-Pro) bond and the different sequence-specific chemical cleavage is with formic acid, (iv) an asparagine-glycine bond and the different sequence-specific chemical cleavage is with hydroxylamine, or (v) a cysteine and the different sequence-specific chemical cleavage is with NTCB.

[0141] Aspect 123: The fusion polypeptide of Aspect 121, wherein the different peptide bond comprises an Asp-Pro bond and the different sequence-specific chemical cleavage is acid cleavage.

[0142] Aspect 124: The fusion polypeptide of any one of Aspects 111-123, wherein the oligopeptides are at least four amino acids long, at least five amino acids long, at least six amino acids long, at least seven amino acids long, at least eight amino acids long, at least nine amino acids long, at least ten amino acids long, at least fifteen amino acids long, at least twenty amino acids long, or at least twenty-five amino acids long.

[0143] Aspect 125: The fusion polypeptide of any one of Aspects 111-124, wherein the oligopeptides are less than fifty amino acids long, less than forty-five amino acids long, less than forty amino acids long, less than thirty-five amino acids long, less than thirty amino acids long, less than twenty-five amino acids long, or less than twenty amino acids long.

[0144] Aspect 126: The fusion polypeptide of any one of Aspects 111-125, wherein the oligopeptides are between four amino acids long and fifty amino acids long, between six amino acids long and forty amino acids long, between six amino acids long and thirty amino acids long, or between eight amino acids long and twenty-five amino acids long.

[0145] Aspect 127. An oligopeptide comprising an active amino acid sequence and an N-terminal proline, a C-terminal aspartic acid, or both the N-terminal proline and the C-terminal aspartic acid, wherein the active amino acid sequence is a miPEP and the oligopeptide regulates an miRNA or the active amino acid sequence is a peptide microbial inhibitor and the oligopeptide inhibits a microbe.

[0146] Aspect 128: A nucleic acid encoding a fusion polypeptide of any one of Aspects 22-39, the onconase of Aspect 109 or Aspect 110, or the fusion polypeptide of any one of Aspects 111-126.

[0147] Aspect 129: A cell comprising the nucleic acid of Aspect 128.

[0148] Aspect 130: The cell of Aspect 129, wherein the cell is a bacterial cell or a yeast cell.

[0149] Aspect 131: The cell of Aspect 129, wherein the bacteria is E. coli or Vibrio natriegens.

[0150] Aspect 132: The cell of Aspect 131, wherein the cell is a BL21 bacterial cell.

[0151] Aspect 133: The cell of Aspect 131, wherein the cell does not express Lon and ompT proteases.

[0152] Aspect 134: The nucleic acid of Aspect 128, wherein the nucleic acid is an isolated nucleic acid.

[0153] Aspect 135: The method of any one of Aspects 1-108, wherein the fusion polypeptide or fusion peptide is expressed in E. coli.

[0154] Aspect 136: The method of any one of Aspects 1-108 and 135, wherein the fusion polypeptide or fusion protein is expressed in cells grown in a fermentation bioreactor.

[0155] Aspect 137: The method of any one of Aspects 1-108, wherein the cleavage takes place for about 1-24 hours at a pH of about 2-3.5 and a temperature of about 70-90° C.

[0156] Aspect 138: A method of producing a fusion polypeptide comprising: expressing the fusion polypeptide comprising an oligopeptide operably linked to the C-terminus or the C-terminus of a modified TAF polypeptide, wherein modified TAF polypeptide comprises an amino acid sequence having at least 90%, at least 91%, at least 92%, at least 93%, at least 94%, at least 95%, at least 96%, at least 97%, at least 98%, at least 99%, or 100% sequence identity to SEQ ID NO: 23.

[0157] Aspect 139: The method of Aspect 138, wherein the fusion polypeptide comprises three or more oligopeptides, four or more oligopeptides, five or more oligopeptides, six or more oligopeptides, eight or more oligopeptides, ten or more oligopeptides, fifteen or more oligopeptides, twenty or more oligopeptides.

[0158] Aspect 140: The method of Aspect 138 or Aspect 139, wherein the two or more oligopeptides are different.

[0159] Aspect 141: The method of any one of Aspects 138-140, wherein all the oligopeptides are operably linked to the N-terminus of the modified TAF polypeptide or all the oligopeptides are operably linked to the C-terminus of the modified TAF polypeptide.

[0160] Aspect 142: The method of any one of Aspects 138-140, wherein at least one oligopeptide is operably linked to the N-terminus of the modified TAF polypeptide and at least one oligopeptide is operably linked to the C-terminus of the modified TAF polypeptide.

[0161] Aspect 143. The method of Aspect 142, wherein the fusion polypeptide comprises two or more oligopeptides, three or more oligopeptides, four or more oligopeptides, five or more oligopeptides, six or more oligopeptides, eight or more oligopeptides, ten or more oligopeptides operably linked to the N-terminus of the modified TAF polypeptide and/or two or more oligopeptides, three or more oligopeptides, four or more oligopeptides, five or more oligopeptides, six or more oligopeptides, eight or more oligopeptides, ten or more oligopeptides operably linked to the C-terminus of the modified TAF polypeptide.

[0162] Aspect 144: The method of any one of Aspects 138-143, wherein the peptide bond comprises (i) a methionine and the sequence-specific chemical cleavage is with cyanogen bromide, (ii) a tryptophan and the sequence-specific chemical cleavage is with BNPS-skatole, (iii) an aspartic acid-proline (Asp-Pro) bond and the sequence-specific chemical cleavage is with formic acid, (iv) an asparagine-glycine bond and the sequence-specific chemical cleavage is with hydroxylamine, or (v) a cysteine and the sequence-specific chemical cleavage is with NTCB.

[0163] Aspect 145: The method of any one of Aspects 138-143, wherein the peptide bond comprises an Asp-Pro bond and the sequence-specific chemical cleavage is with acetic acid or with sulfuric acid.

[0164] Aspect 146: The method of any one of Aspects 138-145, wherein the oligopeptides are operably linked by the peptide bond and are released from each other when the oligopeptides are released from the modified TAF polypeptide.

[0165] Aspect 147: The method of any one of Aspects 138-145, wherein the oligopeptides are operably linked by a different peptide bond and are released from each other by sequence-specific chemical cleavage of the different peptide bond after the oligopeptides are released from the modified TAF polypeptide.

[0166] Aspect 148: The method of Aspect 147, wherein the different peptide bond comprises (i) a methionine and the sequence-specific chemical cleavage is with cyanogen bromide, (ii) a tryptophan and the sequence-specific chemical cleavage is with BNPS-skatole, (iii) an aspartic acid-proline (Asp-Pro) bond and the sequence-specific chemical cleavage is with formic acid, (iv) an asparagine-glycine bond and the sequence-specific chemical cleavage is with hydroxylamine, or (v) a cysteine and the sequence-specific chemical cleavage is with NTCB.

[0167] Aspect 149: The method of Aspect 147, wherein the different peptide bond comprises an Asp-Pro bond and the sequence-specific chemical cleavage is acid cleavage.

[0168] Aspect 150: The method of any one of Aspects 138-149, wherein the oligopeptides are at least four amino acids long, at least five amino acids long, at least six amino acids long, at least seven amino acids long, at least eight amino acids long, at least nine amino acids long, at least ten amino acids long, at least fifteen amino acids long, at least twenty amino acids long, or at least twenty-five amino acids long.

[0169] Aspect 151: The method of any one of Aspects 138-150, wherein the oligopeptides are less than fifty amino acids long, less than forty-five amino acids long, less than forty amino acids long, less than thirty-five amino acids long, less than thirty amino acids long, less than twenty-five amino acids long, or less than twenty amino acids long.

[0170] Aspect 152: The method of any one of Aspects 138-149, wherein the oligopeptides are between four amino acids long and fifty amino acids long, between six amino acids long and forty amino acids long, between six amino acids long and thirty amino acids long, or between eight amino acids long and twenty-five amino acids long.

[0171] Aspect 153: The method of any one of Aspects 138-152, wherein the fusion peptide is expressed in bacteria or yeast.

[0172] Aspect 154: The method of Aspect 153, wherein the bacteria is E. coli or Vibrio natriegens

[0173] Aspect 155: A modified TAF polypeptide comprising an amino acid sequence having at least 90%, at least 91%, at least 92%, at least 93%, at least 94%, at least 95%, at least 96%, at least 97%, at least 98%, at least 99%, or 100% sequence identity to SEQ ID NO: 23.

[0174] Aspect 156: The modified TAF polypeptide of Aspect 155, wherein the modified TAF polypeptide comprises the amino acid sequence of SEQ ID NO: 23.

[0175] Aspect 157: A fusion polypeptide comprising a modified TAF polypeptide operably linked to one or more oligopeptides, wherein the operably linkage between the one or more oligopeptides and the modified TAF polypeptide comprise a peptide bond that is capable of sequence-specific chemical cleavage, wherein the modified TAF polypeptide comprises comprising an amino acid sequence having at least 90%, at least 91%, at least 92%, at least 93%, at least 94%, at least 95%, at least 96%, at least 97%, at least 98%, at least 99%, or 100% sequence identity to SEQ ID NO: 23.

[0176] Aspect 158: The fusion polypeptide of Aspect 157, wherein the modified TAF polypeptide comprises the amino acid sequence of SEQ ID NO: 23.

[0177] Aspect 159. The fusion polypeptide of Aspect 157 or Aspect 158, wherein the fusion polypeptide comprises three or more oligopeptides, four or more oligopeptides, five or more oligopeptides, six or more oligopeptides, eight or more oligopeptides, ten or more oligopeptides, fifteen or more oligopeptides, twenty or more oligopeptides.

[0178] Aspect 160: The fusion polypeptide of any one of Aspects 157-159, wherein the two or more oligopeptides are different.

[0179] Aspect 161: The fusion polypeptide of any one of Aspects 157-160, wherein all the oligopeptides are operably linked to the N-terminus of the modified TAF polypeptide or all the oligopeptides are operably linked to the C-terminus of the modified TAF polypeptide.

[0180] Aspect 162: The fusion polypeptide of any one of Aspects 157-160, wherein at least one oligopeptide is operably linked to the N-terminus of the modified TAF polypeptide and at least one oligopeptide is operably linked to the C-terminus of the modified TAF polypeptide.

[0181] Aspect 163. The fusion polypeptide of Aspect 162, wherein the fusion polypeptide comprises two or more oligopeptides, three or more oligopeptides, four or more oligopeptides, five or more oligopeptides, six or more oligopeptides, eight or more oligopeptides, ten or more oligopeptides operably linked to the N-terminus of the modified TAF polypeptide and/or two or more oligopeptides, three or more oligopeptides, four or more oligopeptides, five or more oligopeptides, six or more oligopeptides, eight or more oligopeptides, ten or more oligopeptides operably linked to the C-terminus of the modified TAF polypeptide.

[0182] Aspect 164: The fusion polypeptide of any one of Aspects 157-163, wherein the peptide bond comprises (i) a methionine and the sequence-specific chemical cleavage is with cyanogen bromide, (ii) a tryptophan and the sequence-specific chemical cleavage is with BNPS-skatole, (iii) an aspartic acid-proline (Asp-Pro) bond and the sequence-specific chemical cleavage is with formic acid, (iv) an asparagine-glycine bond and the sequence-specific chemical cleavage is with hydroxylamine, or (v) a cysteine and the sequence-specific chemical cleavage is with NTCB.

[0183] Aspect 165: The fusion polypeptide of any one of Aspects 157-163, wherein the peptide bond comprises an Asp-Pro bond and the sequence-specific chemical cleavage is acid cleavage.

[0184] Aspect 166: The fusion polypeptide of any one of Aspects 157-165, wherein the oligopeptides are operably linked by the peptide bond and are capable of release from each other with the sequence-specific chemical cleavage.

[0185] Aspect 167: The fusion polypeptide of any one of Aspects 157-165, wherein the oligopeptides are operably linked by a different peptide bond and are capable of release from each other by a different sequence-specific chemical cleavage.

[0186] Aspect 168: The fusion polypeptide of Aspect 167, wherein the different peptide bond comprises (i) a methionine and the different sequence-specific chemical cleavage is with cyanogen bromide, (ii) a tryptophan and the different sequence-specific chemical cleavage is with BNPS-skatole, (iii) an aspartic acid-proline (Asp-Pro) bond and the different sequence-specific chemical cleavage is with formic acid, (iv) an asparagine-glycine bond and the different sequence-specific chemical cleavage is with hydroxylamine, or (v) a cysteine and the different sequence-specific chemical cleavage is with NTCB.

[0187] Aspect 169: The fusion polypeptide of Aspect 167, wherein the different peptide bond comprises an Asp-Pro bond and the different sequence-specific chemical cleavage is acid cleavage.

[0188] Aspect 170: The fusion polypeptide of any one of Aspects 157-169, wherein the oligopeptides are at least four amino acids long, at least five amino acids long, at least six amino acids long, at least seven amino acids long, at least eight amino acids long, at least nine amino acids long, at least ten amino acids long, at least fifteen amino acids long, at least twenty amino acids long, or at least twenty-five amino acids long.

[0189] Aspect 171: The fusion polypeptide of any one of Aspects 157-170, wherein the oligopeptides are less than fifty amino acids long, less than forty-five amino acids long, less than forty amino acids long, less than thirty-five amino acids long, less than thirty amino acids long, less than twenty-five amino acids long, or less than twenty amino acids long.

[0190] Aspect 172: The fusion polypeptide of any one of Aspects 157-171, wherein the oligopeptides are between four amino acids long and fifty amino acids long, between six amino acids long and forty amino acids long, between six amino acids long and thirty amino acids long, or between eight amino acids long and twenty-five amino acids long.

[0191] Aspect 173: A nucleic acid encoding a fusion polypeptide of any one of Aspects 22-39, the modified RAF polypeptide of Aspect 155 or Aspect 156, or the fusion polypeptide of any one of Aspects 157-172.

[0192] Aspect 174: A cell comprising the nucleic acid of Aspect 173.

[0193] Aspect 175: The cell of Aspect 174, wherein the cell is a bacterial cell or a yeast cell.

[0194] Aspect 176: The cell of Aspect 174, wherein the bacteria is E. coli or Vibrio natriegens.

[0195] Aspect 177: The cell of Aspect 176, wherein the cell is a BL21 bacterial cell.

[0196] Aspect 178: The cell of Aspect 176, wherein the cell does not express Lon and ompT proteases.

[0197] Aspect 179: The nucleic acid of Aspect 173, wherein the nucleic acid is an isolated nucleic acid.

### BRIEF DESCRIPTION OF THE DRAWINGS

[0198] FIG. 1A is a schematic representation of the onconase-based fusion construct used for strategies for peptide bioproduction as exemplary means for production of peptides with insoluble carrier polypeptides. FIG. 1B shows the RP-HPLC chromatograms for the four pHs tested in the first experiment of Example 1 overlapped with the peaks for the peptide fraction and the protein fraction highlighted.

[0199] FIGS. 2A-2B compare the quantities of peptide and fusion protein released for four pHs tested from pH 2 to pH 5. FIG. 2A shows the quantity of peptide released by cleavage at the four pHs tested. FIG. 2B shows the quantity of fusion protein solubilized at the four pHs tested.

[0200] FIGS. 3A-3B compare the quantities of peptide and fusion protein released for seven pHs tested from pH 1.5 to pH 3. FIG. 3A shows the quantity of peptide released by cleavage at the seven pHs tested. FIG. 3B shows the quantity of fusion protein solubilized at the seven pHs tested.

[0201] FIGS. 4A-4B show increasing amounts of the acidic form of the peptide at decreasing pHs. FIG. 4A shows overlapping RP-HPLC chromatograms for each of the 5 pHs tested with the basic form on the left and the acidic form on the right. FIG. 4B shows the relative amounts of the basic form (black bar) and the acidic form (grey bar) at eight pHs tested.

[0202] FIGS. 5A-5B fusion protein constructs tested and SDS PAGE of the post expression cell lysate for each. FIG. 5A shows the five constructs tested. FIG. 5B shows an SDS PAGE with from left-to-right: molecular weight markers, onconase fusion, KSI fusion, PurF fusion, TAF12 fusion, and OmpX fusion. After cleavage and purification, the amounts of peptide were (relative to onconase as 100%): KSI fusion (120%), PurF fusion (75%), TAF12 fusion (265%), and OmpX fusion (37%).

[0203] FIGS. 6A-6C are schematic representations of different onconase-based fusion strategies for peptide bioproduction as exemplary means for production of peptides with insoluble carrier polypeptides. FIG. 6A is a schematic of a homoconcatemeric onconase fusion construct, where several identical peptide sequences are added with an additional aspartate-proline (DP) cleavage site, and with up to 10 copies of peptides (N). FIG. 6B is a schematic of a heteroconcatemeric construct, with copies of peptides of different sequences (M) linked with Asp-Pro (DP) cleavage sites fused to an onconase protein. FIG. 6C shows an onconase fusion with only one peptide sequence is at the C-terminus.

[0204] FIG. 7 depicts the SDS-PAGE analysis of the insoluble fraction of different onconase constructs with either 1 (X1) or 3 (X3) peptide copies. Peptides A, B and C are all 10 amino acids-long hydrophilic peptides but differ in their amino acid sequence. MW: Molecular Weight marker.

[0205] FIGS. 8A-8B shows cleavage from a concatemeric ONC fusion protein. FIG. 8A shows the RP-HPLC chromatogram after four hours of cleavage with the monopeptide, dipeptide and tripeptide peaks labeled. FIG. 8B shows the RP-HPLC chromatogram after sixteen hours of cleavage with the monopeptide and dipeptide peaks labeled.

[0206] FIGS. 9A-9C depict N-terminal variants of onconase and the results of comparative peptide yield studies. FIG. 9A is a schematic of the onconase constructs (Constructions A (SEQ ID NO: 2403), B (SEQ ID NO: 2404), C (SEQ ID NO: 2405), D (SEQ ID NO: 2406), E (SEQ ID NO: 2407), F (SEQ ID NO: 2408), G (SEQ ID NO: 2409), H (SEQ ID NO: 2410), and WT N-ter sequence (SEQ ID NO: 2411)). FIG. 9B shows the sequences of all N-terminus sequences exchanged to generate the onconase variant constructs. FIG. 9C shows a comparison of peptide yield obtained after chemical cleavage for onconase constructs A-H and the unmutated onconase.

[0207] FIG. 10 shows a comparison of MP18357 peptide quality produced with three different onconase variant constructs with modified N-terminus. Comparisons with the HPLC profile of the original onconase construct if SEQ ID NO:1 are shown the panel inserts (top right corner of each panel).

[0208] FIGS. 11A-11B show the results from the chemical cleavage optimization using the concatemeric onconase strategy. FIG. 11A is a schematic of the onconase concatemeric strategy used. Different peptide sizes are produced when incomplete chemical cleavage of the concatemer occurs. FIG. 11B shows the RP-HPLC profile for incomplete chemical digestion of the onconase concatemer at 40° C.

[0209] FIGS. 12A-12C depict a time course of the peptide distribution percentage as detected by RP-HPLC upon incubation with acetic acid. Chemical cleavage was carried out at 40° C. (FIG. 12A), 60° C. (FIG. 12B), or 80° C. (FIG. 12C). The Y axis represents the percentage of each species (monopeptide, dipeptide, or tripeptide).

[0210] FIG. 13 shows a comparison of peptide release over time after chemical cleavage of a concatemeric onconase construct at different temperatures.

[0211] FIGS. 14A-14D show the RP-HPLC analysis of a concatemeric construct with 3 copies of the MP18357 peptide. FIG. 14A shows the RP-HPLC profile obtained after solubilization at 60° C. using a protein concentration of 20 g/L, and with 20%, 30%, 40% and 50% of acetic acid (overlaid). FIG. 14B shows the RP-HPLC profile obtained after solubilization at 80° C. using a protein concentration of 50 g/L, and with 20%, 30%, 40% and 50% of acetic acid (overlaid). FIG. 14C shows the RP-HPLC profile obtained after solubilization at 60° C. using a protein concentration of 20 g/L, and with 20%, 30%, 40% and 50% of formic acid (overlaid). FIG. 14D shows the comparison of RP-HPLC profiles obtained after solubilization at 80° C. using a protein concentration of 50 g/L, and with 20% formic acid or 20% acetic acid (overlaid).

[0212] FIGS. 15A-15B are schematics of peptide production protocols. FIG. 15A is a schematic of a chaotropic agent-free protocol for peptide production, while FIG. 15B is a schematic workflow protocol that requires addition of a chaotropic agent for onconase solubilization.

[0213] FIG. 16 shows a comparison of peptide yield between when peptide production is performed using a chaotropic agent-free protocol or a protocol that requires addition of a chaotropic agent for onconase solubilization. The yields are expressed in mg/L of flask culture.

[0214] FIG. 17 shows the disease control percentage (%) for peptides sprayed on tomato plants infected with grey mold (Botrytis cinerea). The peptides were sprayed 24 h post infection at concentration of 0.1 g/l or 0.3 g/l.

[0215] FIG. 18A shows the design of onconase fusion constructs with 1 to 6 copies of the oligopeptide MP18913. FIG. 18B provides a table with the total number of peptides, the total number of peptides on the N-terminus, and the number of peptides on the C-terminus. FIG. 18C show SDS-PAGE analysis of fusion protein expression with 10 μl/well and from left to right showing ONC357_1x3, ONC357_2x3, ONC357_3x3, ONC357x3, ONC357x4, NEB P7717 molecular weight markers, ONC357x3, ONC357x4, ONC357x5, ONC357x6, and NEB P7717 molecular weight markers.

[0216] FIG. 19 shows a HPLC analysis of peptide release following acidic cleavage.

[0217] FIG. 20A shows an amino acid sequence comparison between SEQ ID NO: 2412 and an onconase variant comprising three lysine to alanine substitutions and deletion of six C-terminal histidines (SEQ ID NO: 2413). FIG. 20B shows an alignment of several onconase variants (SEQ ID NOS: 2414-2421).

[0218] FIGS. 21A-21B show exemplary schematics of the cells and batch cultures that result from the incorporation of the inclusion bodies into E. coli culture. FIG. 21A shows an exemplary schematic of an E. coli cell containing a DNA concatemer that includes a fusion carrier protein (also marked with an asterisk), two amino acids used repeatedly as linkers (“XY”), and peptides of interest (“PEP”) located between the linkers. FIG. 21B shows an exemplary bioreactor in the process of scaling batches of expressed peptide titers (left) and an E. coli cell (right) producing an inclusion body (dashed grey line) as a result of the activity of the incorporated DNA concatemer.

### DETAILED DESCRIPTION

[0219] Provided herein are methods of producing oligopeptides, methods of releasing an oligopeptide fused to an insoluble carrier polypeptide that forms inclusion bodies in a cell, methods of purifying inclusion bodies comprising a fusion protein, and methods of producing a fusion polypeptide. Also provided herein are fusion polypeptides comprising an insoluble carrier polypeptide (e.g., an onconase polypeptide or a TAF12 polypeptide) operably linked to two or more oligopeptides, and modified insoluble carrier polypeptides (e.g., onconase polypeptides or TAF12 polypeptides), oligopeptides comprising an active amino acid sequence.

[0220] The methods and polypeptides of the disclosure are based, at least in part, on Applicant's discovery of a bioproduction process utilizing concatemeric protein constructs comprising an insoluble carrier polypeptide (e.g., an onconase polypeptide or a TAF12 polypeptide) and two or more oligopeptides that increased peptide yield and quality of peptides over other bioproduction methods. Applicant's bioproduction process surprisingly improved the production of short, biologically active peptides, which are known in the art to be challenging to produce. In contrast to previous methods, the methods disclosed herein do not require the use of a chaotropic agent or a column-based purification step, and thus reduce the financial and technical burden of peptide bioproduction. Applicant has also developed variant insoluble carrier polypeptides (e.g., onconase polypeptides or TAF12 polypeptides) that exhibit increased expression in inclusion bodies when expressed in a host cell. Accordingly, these variant onconase polypeptide may be used as a fusion partner for increasing bioproduction of a peptide of interest operably linked to the variant onconase. Without wishing to be bound by theory, the increased accumulation of the peptide of interest in inclusion bodies allows for a higher level of the peptide to be purified from a host cell.

[0221] As used herein, an “amino acid” or “amino acid residue” refers to any naturally occurring amino acid, any non-naturally occurring amino acid, any modified amino acid, including derivatized amino acids, or any amino acid mimetic known in the art. The amino acid may be referred by both their common three letter abbreviation and single letter abbreviation.

[0222] As used herein, the term “peptide” refers to any peptide structure comprising or consisting of two or more amino acids, including chemical modifications and derivatives of amino acids. In some embodiments, the peptide is a short peptide (e.g., 4 to 50 amino acids in length). In some embodiments, a peptide is an oligopeptide released upon cleavage of a polypeptide.

[0223] As used herein, the term “purified” molecule refers to biological or synthetic molecules that are removed from their natural environment and are isolated or separated and are free from other components with which they are naturally associated.

[0224] The term “isolated” in reference to a molecule including a nucleic acid, construct, vector, etc., may refer to a molecule that is not found in nature and/or is present in a context in which it is not found in nature. The term “isolated” may also refer to a molecule that has undergone at least one step towards being isolated or concentrated or enriched from a more complex solution or source. The term “isolated,” however, is in no way intended to limit the molecule to a particular location or state. For example, an isolated nucleic acid molecule includes the nucleic acid molecule introduced into the genome of a cell in a position where it is not found in nature or when it is resident in progeny of cells into which the nucleic acid molecule has been introduced into its genome in a position where it is not found in nature.

[0225] The term “sequence identity” refers to the degree of similarity between two nucleic acid sequences, or two amino acid sequences, is expressed in terms of the similarity between the sequences, and otherwise referred to as sequence identity. Sequence identity is frequently measured in terms of percentage identity (or similarity or homology); the higher the percentage, the more similar the two sequences are.

[0226] As used herein, a “concatemeric polypeptide”, or “concatemer,” refers to a polypeptide that includes multiple copies of a given unit (e.g., an oligopeptide) as tandem repeats. In some embodiments a concatemeric polypeptide is a homoconcatemer (each oligopeptide unit is the same). In some embodiments, a concatemeric polypeptide is a heteroconcatemer (there are more than one different oligopeptide). In some embodiments, the concatemeric polypeptide comprises a linker between the units.

[0227] As used herein, “active amino acid sequence,” “biologically active amino acid sequence,” and “active sequence” refer to an amino acid sequence capable of inducing a biological effect in living cells and/or organisms that are exposed to said amino acid sequence. In some embodiments, the active amino acid sequence has microbe inhibiting activity. In some embodiments, the active amino acid sequence confers a benefit to a plant.

[0228] As used herein “onconase variant” is an onconase polypeptide that comprises one or more amino acid insertions, deletions, or substitutions compared to the amino acid sequence set forth in SEQ ID NO:1.

### I. Methods of Producing Oligopeptides

[0229] Some aspects of the present disclosure provide for methods of producing oligopeptides. In some embodiments, the methods for producing oligopeptides comprise expressing a fusion polypeptide comprising an insoluble carrier polypeptide (e.g., an onconase polypeptide or a TAF12 polypeptide) operably linked to two or more oligopeptides by a peptide bond, and releasing the releasing the two or more oligopeptides from the insoluble carrier polypeptide (e.g., an onconase polypeptide or a TAF12 polypeptide) by sequence-specific chemical cleavage of the peptide bond.

### Fusion Proteins

[0230] In some embodiments, the fusion polypeptide comprising an insoluble carrier polypeptide (e.g., an onconase polypeptide or a TAF12 polypeptide) is operably linked to two or more oligopeptides. In some embodiments, the method comprises expressing a fusion polypeptide comprising an insoluble carrier polypeptide (e.g., an onconase polypeptide or a TAF12 polypeptide) and two or more polypeptides. For example, the fusion polypeptide comprises an insoluble carrier polypeptide (e.g., an onconase polypeptide or a TAF12 polypeptide) operably linked to three or more oligopeptides, four or more oligopeptides, five or more oligopeptides, six or more oligopeptides, eight or more oligopeptides, ten or more oligopeptides, fifteen or more oligopeptides, twenty or more oligopeptides. In some embodiments, the fusion polypeptide comprises two or more oligopeptides that have the same amino acid sequence. In some embodiments, the fusion polypeptide comprises two or more oligopeptides that have different amino acid sequences. In some embodiments, the fusion polypeptide comprises two or more oligopeptides that have the same amino acid sequence and two or more oligopeptides comprising different amino acid sequences.

[0231] In some embodiments, the fusion polypeptide comprises an insoluble carrier polypeptide (e.g., an onconase polypeptide or a TAF12 polypeptide) and two or more oligopeptides operably linked to the N-terminus and/or the C-terminus of the onconase protein. For instance, the fusion polypeptide may include two or more oligopeptides operably linked to each of the N-terminus and the C-terminus of the insoluble carrier polypeptide (e.g., an onconase polypeptide or a TAF12 polypeptide). In some embodiments, the fusion polypeptide comprises a total of 2, 3, 4, 5, 6, 7, 8, 9, 10, 15, 20, 25, or more oligopeptides operably linked to the N-terminus and/or the C-terminus of the onconase protein. In some embodiments, the number of the oligopeptides operably linked to each terminus of the onconase may be the same, or different.

[0232] In some embodiments, the fusion polypeptide comprises an insoluble carrier polypeptide (e.g., an onconase polypeptide or a TAF12 polypeptide), and no oligopeptides operably linked to the N-terminus of the insoluble carrier polypeptide (e.g., an onconase polypeptide or a TAF12 polypeptide) and two or more oligopeptides operably linked to the C-terminus. In some embodiments, the fusion polypeptide comprises an insoluble carrier polypeptide (e.g., an onconase polypeptide or a TAF12 polypeptide), and no oligopeptides operably linked to the N-terminus of the insoluble carrier polypeptide (e.g., an onconase polypeptide or a TAF12 polypeptide) and four, five or six oligopeptides operably linked to the C-terminus. In some embodiments, the fusion polypeptide comprises an insoluble carrier polypeptide (e.g., an onconase polypeptide or a TAF12 polypeptide), and two or more oligopeptides operably linked to the N-terminus of the insoluble carrier polypeptide (e.g., an onconase polypeptide or a TAF12 polypeptide) and three oligopeptides operably linked to the C-terminus. In some embodiments, the fusion polypeptide comprises an insoluble carrier polypeptide (e.g., an onconase polypeptide or a TAF12 polypeptide), and one, two or three oligopeptides operably linked to the N-terminus of the insoluble carrier polypeptide (e.g., an onconase polypeptide or a TAF12 polypeptide) and three oligopeptides operably linked to the C-terminus. In some embodiments, one or more of the oligopeptides operably linked to the N-terminus of the onconase may have the same amino acid sequence as one or more of the oligopeptides operably linked to the C-terminus of the insoluble carrier polypeptide (e.g., an onconase polypeptide or a TAF12 polypeptide). In some embodiments, one or more of the oligopeptides operably linked to the N-terminus of the onconase have a different amino acid sequence than one or more of the oligopeptides operably linked to the C-terminus of the onconase. In some embodiments, the fusion polypeptide comprises an insoluble carrier polypeptide (e.g., an onconase polypeptide or a TAF12 polypeptide) and two or more oligopeptides linked to the C-terminus of the onconase. In some embodiments, two or more oligopeptides linked to the C-terminus of the onconase have the same amino acid sequence. In some embodiments, two or more oligopeptides linked to the C-terminus of the onconase have a different amino acid sequence. In some embodiments, the fusion polypeptide comprises an insoluble carrier polypeptide (e.g., an onconase polypeptide or a TAF12 polypeptide) and two or more oligopeptides are linked to the N-terminus of the onconase. In some embodiments, two or more oligopeptides linked to the N-terminus of the onconase have the same amino acid sequence. In some embodiments, two or more oligopeptides linked to the N-terminus of the onconase have a different amino acid sequence. In some instances, the insoluble carrier polypeptide (e.g., an onconase polypeptide or a TAF12 polypeptide) is separated from the two or more oligopeptides by a peptide bond. In some embodiments, the two or more oligopeptides are separated themselves by a peptide bond. In some embodiments, the peptide bond includes a cleavable bond.

[0233] The cleavable bond may be cleaved by enzymatic or chemical agents. In some embodiments, the cleavable bond is a peptide bond. Cleavage of the peptide bond may result in separation of the insoluble carrier polypeptide (e.g., an onconase polypeptide or a TAF12 polypeptide) from the oligopeptides and/or of the oligopeptides from each other. Any cleavable peptide bond cleavable by any methods or agents in the art may be used with the present methods. Proteolytic enzymes and their respective cleavage site specificities are well known in the art. Examples of enzymes useful for cleaving the peptide linker include, but are not limited to Arg-C proteinase, Asp-N endopeptidase, chymotrypsin, clostripain, enterokinase, Factor Xa, glutamyl endopeptidase, Granzyme B, Achromobacter proteinase I, pepsin, proline endopeptidase, proteinase K, Staphylococcal peptidase I, thermolysin, thrombin, trypsin, TEV protease, HRV3C, and members of the Caspase family of proteolytic enzymes (e.g. Caspases 1-10). Chemical cleavage agents are also well known in the art and can results in cleavage of a polypeptide at a peptide bond between specific pairs of amino acids. Examples of chemical cleavage reagents include cyanogen bromide (cleaves after methionine residues leaving a C-terminal homoserine lactone in place of the methionine), N-chloro succinimide, iodobenzoic acid or BNPS-skatole [2-(2-nitrophenylsulfenyl)-3-methylindole](each of which cleaves tryptophan residues leaving a C-terminal tryptophan (with lactone)), dilute acids (which cleave at aspartyl-prolyl bonds leaving a C-terminal aspartate and an N-terminal proline), and hydroxylamine (which cleaves at asparagine-glycine bonds at pH 9.0 leaving a C-terminal asparagine and an N-terminal glycine). Additional chemical cleavage agents are described in Gavit, P. and Better, M., J. Biotechnol., 79:127-136 (2000); Szoka et al., DNA, 5(1):11-20 (1986); and Walker, J. M., The Proteomics Protocols Handbook, 2005, Humana Press, Totowa, N.J.)). In some embodiments, the peptide cleavable bonds between the peptides are cleavable by the same reagent as the peptide cleavable bonds between the peptide and the onconase. In some embodiments, the peptide cleavable bonds between the peptides are cleavable by a different reagent from the peptide cleavable bonds between the peptide and the onconase.

[0234] In some embodiments, the cleavage is at a specific amino acid sequence. In some embodiments, the peptide bond includes (i) a methionine and the sequence-specific chemical cleavage is with cyanogen bromide, (ii) a tryptophan and the sequence-specific chemical cleavage is with BNPS-skatole, (iii) an aspartic acid-proline (Asp-Pro) bond and the sequence-specific chemical cleavage is with formic acid, acetic acid, or any diluted acid solution, (iv) an asparagine-glycine bond and the sequence-specific chemical cleavage is with hydroxylamine, or (v) a cysteine and the sequence-specific chemical cleavage is with NTCB. In some embodiments, the two or more oligopeptides are operably linked to the insoluble carrier polypeptide (e.g., an onconase polypeptide or a TAF12 polypeptide) by a peptide bond comprising an Asp-Pro bond and the sequence-specific chemical cleavage is with formic acid or acetic acid. In some embodiments, the peptides are linked to one another by a peptide bond comprising an Asp-Pro bond and the sequence-specific chemical cleavage is with formic acid or acetic acid.

[0235] The two or more oligopeptides may correspond to any desired amino acid sequence. In some instances, the oligopeptides may be small peptides (e.g., 4 to 25 amino acids in length). For example, the oligopeptides may be at least four, at least five, at least six, at least seven, at least eight, at least nine, at least ten, at least fifteen, at least twenty, or at least twenty-five amino acids long. The oligopeptides may instead be longer peptides (e.g., up to fifty amino acids in length). The oligopeptides may be less than fifty, less than forty-five, less than forty, less than thirty-five, less than thirty, less than twenty-five, or less than twenty amino acids long. In some instances, the oligopeptides are between four and fifty, between six and forty amino acids long, between six and thirty amino acids long, or between eight and twenty-five amino acids long.

[0236] In some embodiments, the one or more oligopeptide comprises the amino acid sequence of any one of SEQ ID NOs: 12-14 and 31-2401. In some embodiments, one or more oligopeptides comprise an amino acid sequence that has at least 80%, at least 85%, at least 90%, at least 91%, at least 92%, at least 93%, at least 94%, at least 95%, at least 96%, at least 97%, at least 98%, or at least 99% sequence identity with the amino acid sequence set forth in SEQ ID NO: 12. In some embodiments, one or more oligopeptides comprise an amino acid sequence that has between 80% to 85%, 85% to 90%, 90% to 95%, or 95% to 100% sequence identity with the amino acid sequence set forth in SEQ ID NO: 13. In some embodiments, the one or more oligopeptides comprise at least one amino acid sequence that has at least 80%, at least 85%, at least 90%, at least 91%, at least 92%, at least 93%, at least 94%, at least 95%, at least 96%, at least 97%, at least 98%, or at least 99% sequence identity with the amino acid sequence set forth in SEQ ID NO: 14.

[0237] In some embodiments, the fusion polypeptide comprises an insoluble carrier polypeptide (e.g., an onconase polypeptide or a TAF12 polypeptide) linked to two or more micropeptides (miPEPs). miPEPs are short peptides (7-44 amino acids long) defined by one or several short open reading frames located in the pri-microRNA sequence of a specific miRNA member. Without wishing to be bound by theory, miPEPs target the pri-microRNA of their encoding miRNA to either upregulate or downregulate transcription. miPEPs may target miRNAs involved various processes, such as miRNAs involved in immunity and susceptibility to a pathogen (e.g., a microbe), organogenesis, response to stress, embryonic development, etc. In some embodiments, each of the two or more oligopeptides comprise a miPEP sequence that regulates a miRNA. In some embodiments, the two or more oligopeptides comprise a miPEP sequence that regulates one or more miRNA families. In some embodiments, each of the two or more oligopeptides comprise a miPEP sequence that regulates one or more members of a particular miRNA family. In some embodiments, each of the two or more oligopeptides comprise a miPEP sequence that regulates a plant miRNA, a fungal miRNA, or a metazoan miRNA. In some embodiments, each of the two or more oligopeptides comprise a miPEP sequence that regulates a plant miRNA. Exemplary plant microRNA families that may be regulated by miPEPs include, but are not limited to, plant miRNA families miR156, miR159/319, miR160, miR162, miR164, miR166, miR167, miR168, miR169, miR171, miR172, miR390, miR393, miR394, miR295, miR396, miR397, miR398, miR408, miR403, miR437, miR444, and miR445. In some embodiments, each of the two or more oligopeptides comprise a miPEP sequence that has microbe inhibiting activity.

[0238] In some embodiments, the oligopeptides comprise any other peptide of interest. In some embodiments, the oligopeptides comprise a polypeptide that is toxic to a host cell. In some embodiments, the oligopeptides comprise a therapeutic polypeptide, a toxin, a cytokine, a peptide hormone, a clotting factor, an immunogenic peptide, an allergen, an antimicrobial peptide, a ligand binding domain, or any combination thereof. In some embodiments, the immunogenic peptide is a peptide that can induce an immune response to a polypeptide comprising said peptide. In some embodiments, the one or more oligopeptides comprise a peptide fragment of a larger polypeptide. For example, the one or more oligopeptides may comprise a peptide fragment of a receptor, an enzyme, an adhesion molecule or a structural protein.

[0239] In some embodiments, the oligopeptides comprise an active amino acid sequence and a tag at the N-terminus and/or C-terminus. In some embodiments, the N-terminus and/or C-terminus residues may correspond to a cleavage tag produced after release of the oligopeptides. For instance, the residue may be part of a peptide bond that is cleaved by chemical (e.g. acidic cleavage), or enzymatic reactions. In some embodiments, the oligopeptide comprises an active amino acid sequence and an N-terminal proline, a C-terminal aspartic acid, or both the N-terminal proline and the C-terminal aspartic acid. In some embodiments, the active amino acid sequence has antimicrobial activity.

[0240] The fusion polypeptide may also include a linker sequence between the two or more oligopeptides and/or between the insoluble carrier polypeptide (e.g., an onconase polypeptide or a TAF12 polypeptide) and the oligopeptides. The linker sequence may function as a spacer peptide to separate the two or more oligopeptides and/or the insoluble carrier polypeptide (e.g., an onconase polypeptide or a TAF12 polypeptide) and oligopeptides. Any number or linker sequences known in the art may be used. In some embodiments, the linker is about 1 to 50 amino acids in length. In some embodiments, the linker is about 4 to 8 amino acids in length. In some embodiments, the linker sequence is a flexible amino acid sequence. In some embodiments, the flexible linker comprises glycine, serine, or threonine residues, or any combination thereof. In some embodiments, the flexible linker sequence comprises a (GGGGS)ₙ (SEQ ID NO: 2402) or a (G)ₙ sequence, wherein n is an integer. In some embodiments, the flexible linker comprises a GGG, GSGS (SEQ ID NO: 30), GSGSGGT (SEQ ID NO: 31), GGSGTG (SEQ ID NO: 27) or GTGSGTG (SEQ ID NO: 32) amino acid sequence. In some embodiments, the linker sequence is a rigid linker sequence. In some embodiments, the rigid linker sequence comprises a (EAAAK)ₙ (SEQ ID NO: 33) or (XP)ₙ sequence, wherein n is an integer and X is any amino acid. In some embodiments, the linker sequence comprises a flexible linker sequence and a rigid linker sequence. The linker sequence may also provide a cleavable peptide bond by incorporation of a cleavable linker sequence that comprises an amino acid sequence that directs the sequence-specific cleavage of the fusion polypeptide. In some embodiments, the linker sequence may include a sequence for protease or chemical cleavage. In some embodiments, the fusion polypeptide comprises linker sequence comprising the amino acid sequence of SEQ ID NO: 11. In some embodiments, the fusion polypeptide comprises linker sequence comprising the amino acid sequence of SEQ ID NO: 11. In some embodiments, the fusion polypeptide comprises linker sequence comprising the amino acid sequence of SEQ ID NO: 11. In some embodiments, the linker comprises an Asp-Pro sequence.

[0241] In some embodiments, the fusion polypeptide comprises linker sequence separating the two or more oligopeptides and/or a linker sequence separating the insoluble carrier polypeptide (e.g., an onconase polypeptide or a TAF12 polypeptide) from the two or more oligopeptides. In some embodiments, the linker sequence separating the two or more oligopeptides has the same sequence as the linker separating the onconase sequence from the oligopeptides. In some embodiments, the linker sequence between the oligopeptides is different than the linker sequence separating the insoluble carrier polypeptide (e.g., an onconase polypeptide or a TAF12 polypeptide) from the two or more oligopeptides. In some embodiments, the linker sequence provides a cleavable peptide-bond. In some embodiments, the linker sequence comprises an amino acid sequence for sequence-specific cleavage of the linker. In some embodiment, the sequence-specific cleavage is acidic cleavage. In some embodiments, the fusion polypeptide comprises linker sequence comprising the amino acid sequence of SEQ ID NO: 11 separating the two or more oligopeptides and/or separating the insoluble carrier polypeptide (e.g., an onconase polypeptide or a TAF12 polypeptide) from the two or more oligopeptides. In some embodiments, the fusion polypeptide comprises a linker sequence comprising an Asp-Pro linker separating the two or more oligopeptides and/or separating the insoluble carrier polypeptide (e.g., an onconase polypeptide or a TAF12 polypeptide) from the two or more oligopeptides.

[0242] In some embodiments, the fusion polypeptide further comprises one or more amino acid sequence tags. In some embodiments, the amino acid sequence tag does not affect the solubility of the onconase fusion protein. In some embodiments, the amino acid sequence tag has a neutral pI. In some embodiments, the one or more amino acid sequence tags are purification tag peptides. Such tag peptides may include, but are not limited to, glutathione-S-transferase (GST), polyhistidine, maltose binding protein (MBP), avidin, biotin, streptavidin, histidine (His) tags (e.g. His-6X tag), V5 tags, FLAG tags, influenza hemagglutinin (HA) tags, Myc tags, VSV-G tags, thioredoxin (Trx) tags, and ligands for cellular receptor (e.g., insulin receptor ligands). In some embodiments, the one or more amino acid sequence tags are reporter tag peptide sequences. Examples of reporter tag peptide sequences include without limitation horseradish peroxidase (HRP), chloramphenicol acetyltransferase (CAT), beta-galactosidase, beta-glucuronidase, luciferase, and fluorescent proteins (e.g., GFP, CFP, YFP, BFP, etc.).

[0243] In some embodiments, the one or more amino acid sequence tags are operably linked to the N-terminus and/or C-terminus of the insoluble carrier polypeptide (e.g., an onconase polypeptide or a TAF12 polypeptide) or the two or more oligopeptides. In some embodiments, the one or more amino acid sequence tags are operably linked to the N-terminus and/or C-terminus of the insoluble carrier polypeptide (e.g., an onconase polypeptide or a TAF12 polypeptide). In some embodiments, the one or more tag peptides are operably linked to the C-terminus of the insoluble carrier polypeptide (e.g., an onconase polypeptide or a TAF12 polypeptide). In some embodiments, the one or more tag peptides are operably linked to the N-terminus of the insoluble carrier polypeptide (e.g., an onconase polypeptide or a TAF12 polypeptide). In some embodiments, the one or more amino acid sequence tags are operably linked to the N-terminus and/or C-terminus of the two or more oligopeptides. In some embodiments, the one or more tag peptides are operably linked to the N-terminus of the two or more oligopeptides. In some embodiments, the one or more tag peptides are operably linked to the C-terminus of two or more oligopeptides. In some embodiments, the one or more amino acid sequence tags are operably linked to the C-terminus of the insoluble carrier polypeptide (e.g., an onconase polypeptide or a TAF12 polypeptide) and the N-terminus of the two or more oligopeptides. In some embodiments, the one or more amino acid sequence tags are operably linked to the N-terminus of the onconase and the C-terminus of the one or more oligopeptides. In some embodiments, the one or more amino acid sequence tags are operably linked to the C-terminus of one oligopeptide and the N-terminus of another oligopeptide. In some embodiments, the amino acid sequence tag operably linked to the insoluble carrier polypeptide (e.g., an onconase polypeptide or a TAF12 polypeptide) is the same as the amino acid sequence tag operably linked to the two or more oligopeptides. In some embodiments, the amino acid sequence tag operably linked to the insoluble carrier polypeptide (e.g., an onconase polypeptide or a TAF12 polypeptide) is different than the amino acid sequence tag operably linked to the two or more oligopeptides.

[0244] Onconase is an RNAse that exhibits pH-dependent changes in solubility. The solubility of onconase is determined by its isoelectric point (pI). The pI of a protein is the pH at which the protein carries no net electrical charge. In acidic conditions, when the pH is lower than the pI, onconase is positively charged and is soluble. At neutral conditions, when the pH is around the pI, onconase is neutrally charged and forms insoluble aggregates. These insoluble aggregates can be removed from a solution by selective precipitation. The pI corresponds to the average of the acid dissociation constants, or pKa, of amino acids in a particular protein. Thus, the pI is higher when a protein comprises more Arg (pKa=12.48, Lys (pKa=10.79), Tyr (pKa=10.07), Cys (pKa=8.35), His, (pKa=6.04), Asp (pKa=3.86), and Glu (pKa=4.25) residues, and lower when the protein comprises more non-polar amino acid residues. Onconase is a highly cationic protein and has a pI higher than 9.5. In some embodiments, the onconase has a pI of around 7.5. In some embodiments, the onconase has a neutral pI. Moreover, in some embodiments, the onconase lacks any aspartate-proline and asparagine-glycine sequences, which makes it resistant to common chemical cleavage strategies, such as acidic cleavage.

[0245] In some embodiments, the fusion polypeptide comprises an onconase polypeptide comprising the amino acid sequence of SEQ ID NO: 1 operably linked to two or more oligopeptides by a peptide bond. In some embodiments, the fusion polypeptide comprises an onconase polypeptide comprising an amino acid sequence that has at least 80%, at least 85%, at least 90%, at least 91%, at least 92%, at least 93%, at least 94%, at least 95%, at least 96%, at least 97%, at least 98%, or at least 99% sequence identity to SEQ ID NO: 1. In some embodiments, the fusion polypeptide comprises an onconase polypeptide comprising an amino acid sequence that has between 80% to 85%, 85% to 90%, 90% to 95%, or 95% to 100% sequence identity to SEQ ID NO: 1. In some embodiments, the onconase polypeptide is a truncated onconase polypeptide.

[0246] In some embodiments, the fusion polypeptide comprises a variant onconase polypeptide operably linked to two or more oligopeptides by a peptide bond. The variant onconase may be an onconase with mutations that decreased susceptibility to protein cleavage, increase yield, promote aggregation, or promote solubility. For example, the M23L-onconase (M23L-ONC) disclosed by Pane, et al. (Pane, K., et al. (2016) PLoS One. 11(1):e0146552, incorporated herein by reference) does not contain any internal methionine residues and is less susceptible to chemical cleavage strategies. The modifications may be one or more of amino acid substitutions, deletions, or insertions. Other amino acid substitutions, insertions or deletions may be introduced that increase stability, yield or aggregation of the onconase protein.

[0247] In some embodiments, the fusion polypeptide comprises a variant onconase comprising one or more amino acid substitutions as compared to the amino acid sequence of SEQ ID NO: 1. In some embodiments, the one or more amino acid substitutions are conservative amino acid substitutions. Conservative amino acid substitutions refer to the substitution of residues having similar side chains. For example, a group of amino acids having aliphatic side chains is glycine, alanine, valine, leucine, and isoleucine; a group of amino acids having aliphatic-hydroxyl side chains is serine and threonine; a group of amino acids having amide-containing side chains is asparagine and glutamine; a group of amino acids having aromatic side chains is phenylalanine, tyrosine, and tryptophan; a group of amino acids having basic side chains is lysine, arginine, and histidine; and a group of amino acids having sulfur-containing side chains is cysteine and methionine. In some embodiments, the one or more amino acid substitutions are non-conservative amino acid substitutions. Non-conservative substitutions refer to substitutions between amino acids with different properties (e.g., a non-charged residue substituted by a charged residue). In some embodiments, the fusion protein comprises an onconase polypeptide comprising one or more insertions or deletions as compared to the amino acid sequence of SEQ ID NO: 1. The one or more insertions or deletions may be of any amino acid length.

[0248] In some embodiments, the fusion protein comprises an onconase polypeptide with one or more amino acid substitutions that decrease susceptibility to chemical cleavage as compared to an onconase polypeptide having the amino acid sequence of SEQ ID NO: 1. In some embodiments, the fusion protein comprises an onconase polypeptide with one or more deletions or insertions that reduce susceptibility to chemical cleavage as compared to an onconase polypeptide having the amino acid sequence of SEQ ID NO: 1.

[0249] In some embodiments, the fusion protein comprises an onconase polypeptide with one or more amino acid substitutions that increase yield or promote formation of inclusion bodies as compared to an onconase polypeptide having the amino acid sequence of SEQ ID NO: 1. In some embodiments, the one or more amino acid substitutions that increase yield or promote formation of inclusion bodies comprise one or more substitutions of cationic or polar amino acids for non-polar or neutral amino acids. In some embodiments, the onconase comprises one or more amino acid substitutions, insertions, or deletions that reduce solubility. In some embodiments, the one or more amino acid substitutions result in a variant onconase polypeptide having a decreased number of cationic or polar amino acids as compared to an onconase polypeptide having the amino acid sequence of SEQ ID NO: 1. In some embodiments, the one or more amino acid substitutions that increase yield or promote formation of inclusion bodies result in a variant onconase having a decreased number of Lys, Arg, Cys, His, Asp, Glu, and/or Tyr as compared to an onconase polypeptide having the amino acid sequence of SEQ ID NO: 1. In some embodiments, the fusion protein comprises an onconase polypeptide with one or more amino acid substitutions that result in an onconase protein having an altered pI as compared to an onconase polypeptide having the amino acid sequence of SEQ ID NO: 1. In some embodiments, the fusion protein comprises an onconase polypeptide with one or more deletions or insertions that increase yield or promote formation of inclusion bodies as compared to an onconase polypeptide having the amino acid sequence of SEQ ID NO: 1. In some embodiments, the one or more insertions or deletions that increase yield or promote formation of inclusion bodies result in a variant onconase having a decreased number of cationic or polar amino acids as compared to an onconase polypeptide having the amino acid sequence of SEQ ID NO: 1. In some embodiments, the one or more insertions or deletions that increase yield or promote formation of inclusion bodies result in a variant onconase having a decreased number of Lys, Arg, Cys, His, Asp, Glu, and/or Tyr as compared to an onconase polypeptide having the amino acid sequence of SEQ ID NO: 1. In some embodiments, the fusion protein comprises an onconase polypeptide with one or more deletions or insertions that increase yield or promote formation of inclusion bodies as compared to an onconase polypeptide having the amino acid sequence of SEQ ID NO: 1. In some embodiments, the fusion protein comprises an onconase polypeptide with one or more deletions or insertions that result in an onconase protein having an altered pI as compared to an onconase polypeptide having the amino acid sequence of SEQ ID NO: 1. In any of the above embodiments, the onconase polypeptide may comprise an amino acid sequence that has at least 80%, at least 85%, at least 90%, at least 91%, at least 92%, at least 93%, at least 94%, at least 95%, at least 96%, at least 97%, at least 98%, or at least 99% sequence identity to SEQ ID NO: 1. In some embodiments, the onconase polypeptide comprises an amino acid sequence that has between 80% to 85%, 85% to 90%, 90% to 95%, or 95% to 100% sequence identity to SEQ ID NO: 1.

[0250] In some embodiments, the fusion protein comprises an onconase polypeptide with one or more N-terminal amino acid substitutions compared to SEQ ID NO: 1. In some embodiments, the fusion protein comprises an onconase polypeptide with 1, 2, 3, 4, 5, 6, 8, 9, 10, 11, 12, 13, 14, 15, 20, 25, 30, or 35 N-terminal amino acid substitutions compared to SEQ ID NO: 1. In some embodiments, the fusion protein comprises an onconase polypeptide with 11 N-terminal amino acid substitutions compared to SEQ ID NO: 1. In some embodiments, the amino acid substitutions are within the first 50 N-terminal amino acids, within the first 40 N-terminal amino acids, within the first 30 N-terminal amino acids, within the first 20 N-terminal amino acids, or within the first 11 amino acids. In some embodiments, the amino acid substitutions are within the first 15 N-terminal amino acids, within the first 14 N-terminal amino acids, within the first 13 N-terminal amino acids, within the first 12 N-terminal amino acids, within the first 11 N-terminal amino acids, within the first 10 N-terminal amino acids, within the first 9 N-terminal amino acids, within the first 8 N-terminal amino acids, within the first 7 N-terminal amino acids, within the first 6 N-terminal amino acids, within the first 5 N-terminal amino acids, within the first 4 N-terminal amino acids, within the first 3 N-terminal amino acids, or within the first 2 N-terminal amino acids. In some embodiments, one or more N-terminal amino acid substitutions are conservative amino acid substitutions. In some embodiments, one or more N-terminal amino acid substitutions are non-conservative amino acid substitutions. In some embodiments, the fusion protein comprises an onconase polypeptide with one or more N-terminal insertions or deletions compared to SEQ ID NO: 1. In some embodiments, the fusion polypeptide comprises an onconase polypeptide comprises the amino acid sequence of SEQ ID NO: 1. In some embodiments, the fusion polypeptide comprises an onconase polypeptide comprising an amino acid sequence that has at least 80%, at least 85%, at least 90%, at least 91%, at least 92%, at least 93%, at least 94%, at least 95%, at least 96%, at least 97%, at least 98%, or at least 99% sequence identity to SEQ ID NO: 1. In some embodiments, the fusion polypeptide comprises an onconase polypeptide comprising an amino acid sequence that has between 80% to 85%, 85% to 90%, 90% to 95%, or 95% to 100% sequence identity to SEQ ID NO: 1.

[0251] In some embodiments, the fusion protein comprises an onconase polypeptide comprising the amino acid sequence of any one of SEQ ID NOs: 2-10 or 15-22, optionally with one, two, three, four, five or all six C-terminal histidine residues deleted as shown in FIG. 20A. In some embodiments, the fusion protein comprises an onconase polypeptide comprising an amino acid sequence that has at least 80%, at least 85%, at least 90%, at least 91%, at least 92%, at least 93%, at least 94%, at least 95%, at least 96%, at least 97%, at least 98%, or at least 99% sequence identity to the amino acid sequence set forth in SEQ ID NO: 2. In some embodiments, the fusion protein comprises an onconase polypeptide comprising an amino acid sequence that has at least 80%, at least 85%, at least 90%, at least 91%, at least 92%, at least 93%, at least 94%, at least 95%, at least 96%, at least 97%, at least 98%, or at least 99% sequence identity to the amino acid sequence set forth in SEQ ID NO: 3. In some embodiments, the fusion protein comprises an onconase polypeptide comprising an amino acid sequence that has at least 80%, at least 85%, at least 90%, at least 91%, at least 92%, at least 93%, at least 94%, at least 95%, at least 96%, at least 97%, at least 98%, or at least 99% sequence identity to the amino acid sequence set forth in SEQ ID NO: 4. In some embodiments, the fusion protein comprises an onconase polypeptide comprising an amino acid sequence that has at least 80%, at least 85%, at least 90%, at least 91%, at least 92%, at least 93%, at least 94%, at least 95%, at least 96%, at least 97%, at least 98%, or at least 99% sequence identity to the amino acid sequence set forth in SEQ ID NO: 5. In some embodiments, the fusion protein comprises an onconase polypeptide comprising an amino acid sequence that has at least 80%, at least 85%, at least 90%, at least 91%, at least 92%, at least 93%, at least 94%, at least 95%, at least 96%, at least 97%, at least 98%, or at least 99% sequence identity to the amino acid sequence set forth in SEQ ID NO: 6. In some embodiments, the fusion protein comprises an onconase polypeptide comprising an amino acid sequence that has at least 80%, at least 85%, at least 90%, at least 91%, at least 92%, at least 93%, at least 94%, at least 95%, at least 96%, at least 97%, at least 98%, or at least 99% sequence identity to the amino acid sequence set forth in SEQ ID NO: 7. In some embodiments, the fusion protein comprises an onconase polypeptide comprising an amino acid sequence that has at least 80%, at least 85%, at least 90%, at least 91%, at least 92%, at least 93%, at least 94%, at least 95%, at least 96%, at least 97%, at least 98%, or at least 99% sequence identity to the amino acid sequence set forth in SEQ ID NO: 7. In some embodiments, the fusion protein comprises an onconase polypeptide comprising an amino acid sequence that has at least 80%, at least 85%, at least 90%, at least 91%, at least 92%, at least 93%, at least 94%, at least 95%, at least 96%, at least 97%, at least 98%, or at least 99% sequence identity to the amino acid sequence set forth in SEQ ID NO: 8. In some embodiments, the fusion protein comprises an onconase polypeptide comprising an amino acid sequence that has at least 80%, at least 85%, at least 90%, at least 91%, at least 92%, at least 93%, at least 94%, at least 95%, at least 96%, at least 97%, at least 98%, or at least 99% sequence identity to the amino acid sequence set forth in SEQ ID NO: 9. In some embodiments, the fusion protein comprises an onconase polypeptide comprising an amino acid sequence that has at least 80%, at least 85%, at least 90%, at least 91%, at least 92%, at least 93%, at least 94%, at least 95%, at least 96%, at least 97%, at least 98%, or at least 99% sequence identity to the amino acid sequence set forth in SEQ ID NO: 10. In some embodiments, the fusion protein comprises an onconase polypeptide comprising an amino acid sequence that has at least 80%, at least 85%, at least 90%, at least 91%, at least 92%, at least 93%, at least 94%, at least 95%, at least 96%, at least 97%, at least 98%, or at least 99% sequence identity to the amino acid sequence set forth in SEQ ID NO: 15. In some embodiments, the fusion protein comprises an onconase polypeptide comprising an amino acid sequence that has at least 80%, at least 85%, at least 90%, at least 91%, at least 92%, at least 93%, at least 94%, at least 95%, at least 96%, at least 97%, at least 98%, or at least 99% sequence identity to the amino acid sequence set forth in SEQ ID NO: 16. In some embodiments, the fusion protein comprises an onconase polypeptide comprising an amino acid sequence that has at least 80%, at least 85%, at least 90%, at least 91%, at least 92%, at least 93%, at least 94%, at least 95%, at least 96%, at least 97%, at least 98%, or at least 99% sequence identity to the amino acid sequence set forth in SEQ ID NO: 17. In some embodiments, the fusion protein comprises an onconase polypeptide comprising an amino acid sequence that has at least 80%, at least 85%, at least 90%, at least 91%, at least 92%, at least 93%, at least 94%, at least 95%, at least 96%, at least 97%, at least 98%, or at least 99% sequence identity to the amino acid sequence set forth in SEQ ID NO: 18. In some embodiments, the fusion protein comprises an onconase polypeptide comprising an amino acid sequence that has at least 80%, at least 85%, at least 90%, at least 91%, at least 92%, at least 93%, at least 94%, at least 95%, at least 96%, at least 97%, at least 98%, or at least 99% sequence identity to the amino acid sequence set forth in SEQ ID NO: 19. In some embodiments, the fusion protein comprises an onconase polypeptide comprising an amino acid sequence that has at least 80%, at least 85%, at least 90%, at least 91%, at least 92%, at least 93%, at least 94%, at least 95%, at least 96%, at least 97%, at least 98%, or at least 99% sequence identity to the amino acid sequence set forth in SEQ ID NO: 20. In some embodiments, the fusion protein comprises an onconase polypeptide comprising an amino acid sequence that has at least 80%, at least 85%, at least 90%, at least 91%, at least 92%, at least 93%, at least 94%, at least 95%, at least 96%, at least 97%, at least 98%, or at least 99% sequence identity to the amino acid sequence set forth in SEQ ID NO: 21. In some embodiments, the fusion protein comprises an onconase polypeptide comprising an amino acid sequence that has at least 80%, at least 85%, at least 90%, at least 91%, at least 92%, at least 93%, at least 94%, at least 95%, at least 96%, at least 97%, at least 98%, or at least 99% sequence identity to the amino acid sequence set forth in SEQ ID NO: 22. In some embodiments, the fusion polypeptide comprises an onconase polypeptide comprising at least one amino acid sequence that has between 80% to 85%, 85% to 90%, 90% to 95%, or 95% to 100% sequence identity with any one of SEQ ID NOs: 2-10 or 15-22, optionally with one, two, three, four, five or all six C-terminal histidine residues deleted as shown in FIG. 20A.

[0252] In some embodiments, the fusion polypeptide comprises an onconase polypeptide with a modified N-terminus and/or C-terminus. In some embodiments, the fusion polypeptide comprises an onconase polypeptide one or more amino acid substitution in the N-terminus and/or C-terminus as compared to SEQ ID NO: 1. In some embodiments, the fusion polypeptide comprises an onconase polypeptide comprising 11 amino acid substitutions in the N-terminus and/or C-terminus as compared to SEQ ID NO: 1. In some embodiments, the fusion polypeptide comprises an onconase polypeptide 11 amino acid substitutions in the N-terminus as compared to SEQ ID NO: 1.

[0253] In some embodiments, the fusion polypeptide comprises a TAF12 polypeptide comprising the amino acid sequence of SEQ ID NO: 23 operably linked to two or more oligopeptides by a peptide bond. In some embodiments, the fusion polypeptide comprises a TAF12 polypeptide comprising an amino acid sequence that has at least 80%, at least 85%, at least 90%, at least 91%, at least 92%, at least 93%, at least 94%, at least 95%, at least 96%, at least 97%, at least 98%, or at least 99% sequence identity to SEQ ID NO: 23. In some embodiments, the fusion polypeptide comprises a TAF12 polypeptide comprising an amino acid sequence that has between 80% to 85%, 85% to 90%, 90% to 95%, or 95% to 100% sequence identity to SEQ ID NO: 23. In some embodiments, the TAF12 polypeptide is a truncated TAF12 polypeptide.

[0254] In some embodiments, the fusion polypeptide comprises a variant TAF12 polypeptide operably linked to two or more oligopeptides by a peptide bond. The variant TAF12 may be a TAF12 with mutations that decreased susceptibility to protein cleavage, increase yield, promote aggregation, or promote solubility. The modifications may be one or more of amino acid substitutions, deletions, or insertions. Other amino acid substitutions, insertions or deletions may be introduced that increase stability, yield or aggregation of the TAF12 protein.

[0255] In some embodiments, the fusion polypeptide comprises a variant TAF12 comprising one or more amino acid substitutions as compared to the amino acid sequence of SEQ ID NO: 23. In some embodiments, the one or more amino acid substitutions are conservative amino acid substitutions. Conservative amino acid substitutions refer to the substitution of residues having similar side chains. For example, a group of amino acids having aliphatic side chains is glycine, alanine, valine, leucine, and isoleucine; a group of amino acids having aliphatic-hydroxyl side chains is serine and threonine; a group of amino acids having amide-containing side chains is asparagine and glutamine; a group of amino acids having aromatic side chains is phenylalanine, tyrosine, and tryptophan; a group of amino acids having basic side chains is lysine, arginine, and histidine; and a group of amino acids having sulfur-containing side chains is cysteine and methionine. In some embodiments, the one or more amino acid substitutions are non-conservative amino acid substitutions. Non-conservative substitutions refer to substitutions between amino acids with different properties (e.g., a non-charged residue substituted by a charged residue). In some embodiments, the fusion protein comprises a TAF12 polypeptide comprising one or more insertions or deletions as compared to the amino acid sequence of SEQ ID NO: 23. The one or more insertions or deletions may be of any amino acid length.

[0256] In some embodiments, the fusion protein comprises a TAF12 polypeptide with one or more amino acid substitutions that decrease susceptibility to chemical cleavage as compared to a TAF12 polypeptide having the amino acid sequence of SEQ ID NO: 23. In some embodiments, the fusion protein comprises a TAF12 polypeptide with one or more deletions or insertions that reduce susceptibility to chemical cleavage as compared to a TAF12 polypeptide having the amino acid sequence of SEQ ID NO: 23.

[0257] In some embodiments, the fusion protein comprises a TAF12 polypeptide with one or more amino acid substitutions that increase yield or promote formation of inclusion bodies as compared to a TAF12 polypeptide having the amino acid sequence of SEQ ID NO: 23. In some embodiments, the one or more amino acid substitutions that increase yield or promote formation of inclusion bodies comprise one or more substitutions of cationic or polar amino acids for non-polar or neutral amino acids. In some embodiments, the TAF12 comprises one or more amino acid substitutions, insertions, or deletions that reduce solubility. In some embodiments, the one or more amino acid substitutions result in a variant TAF12 polypeptide having a decreased number of cationic or polar amino acids as compared to a TAF12 polypeptide having the amino acid sequence of SEQ ID NO: 23. In some embodiments, the one or more amino acid substitutions that increase yield or promote formation of inclusion bodies result in a variant TAF12 having a decreased number of Lys, Arg, Cys, His, Asp, Glu, and/or Tyr as compared to a TAF12 polypeptide having the amino acid sequence of SEQ ID NO: 23. In some embodiments, the fusion protein comprises a TAF12 polypeptide with one or more amino acid substitutions that result in a TAF12 protein having an altered pI as compared to a TAF12 polypeptide having the amino acid sequence of SEQ ID NO: 23. In some embodiments, the fusion protein comprises a TAF12 polypeptide with one or more deletions or insertions that increase yield or promote formation of inclusion bodies as compared to a TAF12 polypeptide having the amino acid sequence of SEQ ID NO: 23. In some embodiments, the one or more insertions or deletions that increase yield or promote formation of inclusion bodies result in a variant TAF12 having a decreased number of cationic or polar amino acids as compared to a TAF12 polypeptide having the amino acid sequence of SEQ ID NO: 23. In some embodiments, the one or more insertions or deletions that increase yield or promote formation of inclusion bodies result in a variant TAF12 having a decreased number of Lys, Arg, Cys, His, Asp, Glu, and/or Tyr as compared to a TAF12 polypeptide having the amino acid sequence of SEQ ID NO: 23. In some embodiments, the fusion protein comprises a TAF12 polypeptide with one or more deletions or insertions that increase yield or promote formation of inclusion bodies as compared to a TAF12 polypeptide having the amino acid sequence of SEQ ID NO: 23. In some embodiments, the fusion protein comprises a TAF12 polypeptide with one or more deletions or insertions that result in a TAF12 protein having an altered pI as compared to a TAF12 polypeptide having the amino acid sequence of SEQ ID NO: 23. In any of the above embodiments, the TAF12 polypeptide may comprise an amino acid sequence that has at least 80%, at least 85%, at least 90%, at least 91%, at least 92%, at least 93%, at least 94%, at least 95%, at least 96%, at least 97%, at least 98%, or at least 99% sequence identity to SEQ ID NO: 23. In some embodiments, the TAF12 polypeptide comprises an amino acid sequence that has between 80% to 85%, 85% to 90%, 90% to 95%, or 95% to 100% sequence identity to SEQ ID NO: 23.

[0258] In some embodiments, the fusion protein comprises a TAF12 polypeptide with one or more N-terminal amino acid substitutions compared to SEQ ID NO: 23. In some embodiments, the fusion protein comprises a TAF12 polypeptide with 1, 2, 3, 4, 5, 6, 8, 9, 10, 11, 12, 13, 14, 15, 20, 25, 30, or 35 N-terminal amino acid substitutions compared to SEQ ID NO: 23. In some embodiments, the fusion protein comprises a TAF12 polypeptide with 11 N-terminal amino acid substitutions compared to SEQ ID NO: 23. In some embodiments, the amino acid substitutions are within the first 50 N-terminal amino acids, within the first 40 N-terminal amino acids, within the first 30 N-terminal amino acids, within the first 20 N-terminal amino acids, or within the first 11 amino acids. In some embodiments, the amino acid substitutions are within the first 15 N-terminal amino acids, within the first 14 N-terminal amino acids, within the first 13 N-terminal amino acids, within the first 12 N-terminal amino acids, within the first 11 N-terminal amino acids, within the first 10 N-terminal amino acids, within the first 9 N-terminal amino acids, within the first 8 N-terminal amino acids, within the first 7 N-terminal amino acids, within the first 6 N-terminal amino acids, within the first 5 N-terminal amino acids, within the first 4 N-terminal amino acids, within the first 3 N-terminal amino acids, or within the first 2 N-terminal amino acids. In some embodiments, one or more N-terminal amino acid substitutions are conservative amino acid substitutions. In some embodiments, one or more N-terminal amino acid substitutions are non-conservative amino acid substitutions. In some embodiments, the fusion protein comprises a TAF12 polypeptide with one or more N-terminal insertions or deletions compared to SEQ ID NO: 23. In some embodiments, the fusion polypeptide comprises a TAF12 polypeptide comprises the amino acid sequence of SEQ ID NO: 23. In some embodiments, the fusion polypeptide comprises a TAF12 polypeptide comprising an amino acid sequence that has at least 80%, at least 85%, at least 90%, at least 91%, at least 92%, at least 93%, at least 94%, at least 95%, at least 96%, at least 97%, at least 98%, or at least 99% sequence identity to SEQ ID NO: 23. In some embodiments, the fusion polypeptide comprises a TAF12 polypeptide comprising an amino acid sequence that has between 80% to 85%, 85% to 90%, 90% to 95%, or 95% to 100% sequence identity to SEQ ID NO: 23.

### Peptide Release

[0259] In some embodiments, the method for producing oligopeptides comprises releasing the two or more oligopeptides from the insoluble carrier polypeptide (e.g., an onconase polypeptide or a TAF12 polypeptide) by sequence specific cleavage of a peptide bond. In some embodiments, the sequence specific cleavage of the peptide bond is performed by acidic cleavage. In some embodiments, the acidic cleavage is performed by incubation with acetic acid or formic acid. In some embodiments, the incubation is at elevated temperature, such as above room temperature.

[0260] In some embodiments, the oligopeptides are operably linked by the peptide bond and are released from each other when the oligopeptides are released from the onconase. In some embodiments, the oligopeptides are operably linked by a different peptide bond and are released from each other by sequence-specific chemical cleavage of the different peptide bond after the oligopeptides are released from the onconase.

[0261] In some embodiments, the step of releasing the two or more oligopeptides from the insoluble carrier polypeptide (e.g., an onconase polypeptide or a TAF12 polypeptide) is performed in the presence of a chaotropic agent. A chaotropic agent is a molecule that can disrupt the hydrogen bonding network between water molecules. It is theorized that addition of a chaotropic agent may reduce the order of the structure of a protein, thus promoting unfolding of the protein. Examples of chaotropic agents include, without limitation, guanidine hydrochloride (guanidinium hydrochloride, GdnHCl), sodium thiocyanate, n-butanol, ethanol, lithium perchlorate, lithium acetate, magnesium chloride, phenol, 2-propanol, thiourea, sodium dodecyl sulfate, and urea. The chaotropic agent may also be a detergent which disrupts the noncovalent intermolecular bonding within a protein, permitting the amino acid chain to assume a substantially random conformation.

[0262] In some embodiments, the step of releasing the two or more oligopeptides from the insoluble carrier polypeptide (e.g., an onconase polypeptide or a TAF12 polypeptide) is performed in the absence of a chaotropic agent. The addition of a chaotropic agent might not always be desired in protein purification protocols. For instance, addition of a chaotropic agent may require additional steps or conditions to be added to a protocol. These additional steps may increase the amount of time, reagents and cost of a purification protocol, or may negatively affect protein yield or purity.

[0263] The fusion polypeptide may be expressed in any suitable cell. The fusion polypeptide may be expressed in a bacterial, yeast, plant, or animal cell. In some embodiments, the fusion polypeptide is expressed in a unicellular organism. In some embodiments, the fusion polypeptide is expressed in a microbial cell. Any cell or cell culture known to produce inclusion bodies is suitable for expression of the fusion peptide. For example, the fusion polypeptide may be expressed in strains of Escherichia coli and Vibrio natriegens. Suitable yeast cells, include, without limitation, strains of Pichia pastoris. The bacterial strain may be a strain that lacks Lon and ompT protease function (e.g. a BL21 E. coli strain). In some embodiments, the fusion polypeptide is expressed in a bacteria in a bacterial cell culture. In some embodiments, the bacteria is an E. coli strain.

[0264] Expression of the polypeptide may be driven by any suitable promoter known in the art. The promoter may be a constitutive promoter or an inducible promoter. Inducible promoters refer to those regulated promoters that can be turned on by an external stimulus (e.g., a chemical, nutritional stress, or heat). For example, the lac promoter can be induced through use of lactose or IPTG (isopropylthio-β-D-galactoside). Alternatively, the promoter may be a constitutive promoter, which directs expression of the fusion polypeptide in a particular organisms, cell or tissue. The strength of the promoter, whether inducible or constitutive, may vary. For instance, a promoter may be a high expression promoter, or strong promoter, which results in overexpression of a given gene. In some embodiments, the fusion polypeptide is expressed with a strong promoter. In some embodiments, the promoter drives the expression of the fusion protein in aggregates.

[0265] In some embodiments, the method further comprises measuring the yield of released oligopeptides. Protein yield may be measured by any known methods for measuring peptide yield. For instance, peptide yield may be measured in terms of peptide mass obtained from a liter of cell culture, or g/L. In some embodiments, the yield of oligopeptide is at least 10 mg/L of bacterial culture, at least 20 mg/L of bacterial culture, at least 30 mg/L of bacterial culture, at least 40 mg/L of bacterial culture, at least 50 mg/L of bacterial culture. In some embodiments, the yield of oligopeptide is between 10 mg/L to 200 mg/L of bacterial culture, between 20 mg/L to 150 mg/L of bacterial culture, between 30 mg/L to 120 mg/L of bacterial culture, between 40 mg/L to 120 mg/L of bacterial culture, between 50 mg/L to 120 g/L of bacterial culture, between 50 g/L to 100 g/L of bacterial culture, between 60 g/L to 90 g/L of bacterial culture, between 70 g/L to 110 g/L of bacterial culture, or between 40 g/L to 80 g/L of bacterial culture. In some embodiments, the yield of the expressed fusion polypeptide is measured after harvesting cells at stationary phase.

[0266] In some embodiments, the method may comprise expressing the fusion polypeptide in a cell culture in a bioreactor. Use of a bioreactor may lead to higher yields of released oligopeptides. Large scale cell growth and fusion polypeptide expression may utilize a wide range of simple or complex carbohydrates, organic acids or alcohols, and saturated hydrocarbons such as methane. Fusion protein encoding gene expression may be regulated, repressed or depressed by specific growth conditions, which may include the form and amount of nitrogen, phosphorous, sulfur, oxygen, carbon or any trace micronutrient including small inorganic ions. In addition, the regulation may be achieved by the presence or absence of specific regulatory molecules that are added to the culture and are not typically considered nutrient or energy sources.

II. Methods of Releasing Oligopeptides from Insoluble Carrier Polypeptide, which Form Inclusion Bodies

[0267] Some aspects of the present disclosure provide for methods of releasing an oligopeptide fused to an insoluble carrier polypeptide, which forms inclusion bodies in a cell.

[0268] Inclusion bodies are intracellular amorphous deposit comprising aggregated protein found in the cytoplasm or periplasm of a cell. Oligopeptides of interest that are typically soluble with the cell and/or cell lysates can be linked to an insoluble carrier polypeptide, which forms inclusion bodies to facilitate formation of insoluble aggregates that include the oligopeptides. Trapped into inclusion bodies, the oligopeptides are inaccessible to cellular proteases and may accumulate in large quantities. Examples of insoluble carrier polypeptides, which forms inclusion bodies include, without limitation, a trpΔLE polypeptide (Derynck R et al. (1984)), a ketosteroid isomerase polypeptide (Kuliopulos et al. (1994)), a β-galactosidase polypeptide (Schellenberger V et al. (1993)), a PagP polypeptide (Hwang P M et al. (2012)), EDDIE (Achmuller C et al. (2007)), the cleavable self-aggregating tag INTEIN-ELK16 (Zhao Q et al. (2016)), GFIL8 (Wang X. et al. (2015)), a PaP3.30 polypeptide (Rao X C et al. (2004)), TAF12-HFD (Vidovic V et al. (2012)), and the F4 fragment of PurF (Lee J H et al. (2000)). Other exemplary insoluble carrier polypeptides, which forms inclusion bodies include modified versions of a E. coli maltose-binding protein (Betton and Hofnug, J. Biol. Chem. 271:8046-8052 (1996)), an E. coli RNAse II polypeptide (Coburn and Mackie, J. Biol. Chem. 271:1048-1053 (1996)), an E. coli alkaline phosphatase polypeptide (Derman and Beckwith, J Bacteriol. 177:3764-3770 (1995); Georgiou et al., Appl. Env. Microbial. 52:1157-1161 (1986)), an E. coli phospholipase A polypeptide (Dekker et al., Eur. J. Biochem. 232:214-219 (1995)), an E. coli β-lactamase polypeptide (Rinas and Bailey, Appl. Env. Microbiol. 59:561-566 (1993); Georgiou et al., Appl. Env. Microbiol. 52:1157-1161 (1986)), a Salmonella typhimurium MalK protein (Schneider et al., Prot. Exp. Purif. 6:10-14 (1995)), a Clostridium thermocellum endoglucanase D polypeptide (Tokatlidis et al., FEBS Lett. 282:205-208 (1991)), a Bacillus thuringiensis subsp. aizawai IPL7 insecticidal proteins (Oeda et al., J. Bacteriol. 171:3568-3571 (1989), a human procathepsin B polypeptide (Kuhelj et al., Eur. J. Biochem. 229:533-539 (1995)), a porcine interferon-γ polypeptide (Vandenbroeck et al., Eur. J. Biochem. 215:481-486 (1993)), a T5 DNA polymerase polypeptide (Chatterjee et al., Gene 97:13-19 (1991)), and E. coli thioredoxin (Hoog et al., BioSci. Rep. 4:917-923 (1984)). In some embodiments, the insoluble carrier polypeptide is an onconase polypeptide or a TAF12 polypeptide.

[0269] In some embodiments, the methods of releasing an oligopeptide fused to an insoluble carrier polypeptide, which forms inclusion bodies in a cell comprises expressing a fusion polypeptide comprising the oligopeptide operably linked to the insoluble carrier polypeptide, which forms inclusion bodies in a cell; and releasing the two or more oligopeptides from the insoluble carrier polypeptide (e.g., an onconase polypeptide or a TAF12 polypeptide) by sequence-specific chemical cleavage of the peptide bond.

[0270] In some embodiments, the method comprises purifying the inclusion bodies. The inclusion bodies may be purified by lysing the cells to extract the inclusion bodies. The cells may be lysed using any number of means, including mechanical and/or chemical lysis. Any mechanical methods of purifying inclusion bodies from a cell lysate known in the art may be used, including centrifugation, filtration, sonication, French press, shearing, and any combinations thereof).

[0271] The inclusion bodies may also be isolated by solubilization of the aggregates using, for example, micelles or reverse micelles as described in Vinogradov, et al. (2003) Anal Biochem. 15; 320(2):234-8. In some embodiments, purifying the inclusion bodies comprises centrifuging the inclusion bodies. In some embodiments, centrifuging the inclusion bodies results in separation of the inclusion bodies from the cell lysate. In some embodiments, the inclusion bodies are solubilized in a solution comprising a chemical cleavage agent after purification. In some embodiments, the inclusion bodies are solubilized in a chaotropic agent-free solution after purification. In some embodiments, the method comprises purifying inclusion bodies formed by a fusion protein comprising an onconase fused to two or more oligopeptide. In some embodiments, the fusion protein is expressed in bacteria or yeast. In some embodiments, the fusion protein comprises a cleavable Asp-Pro bond. In some embodiments, the oligopeptides are 4-50 or 5-30 amino acids long. In some embodiments, the onconase is a variant onconase.

[0272] In some embodiments, the method of purifying inclusion bodies comprises expressing the fusion protein in a cell, purifying the inclusion bodies, and incubating the inclusion bodies with acetic acid, further comprises incubating the inclusion bodies with acetic acid. In some embodiments, the inclusion bodies are incubated with acetic acid at a high temperature. In some embodiments, the temperature is greater than 50° C., greater than 60° C., greater than 70° C., greater than 80° C., or greater than 90° C. In some embodiments, the temperature is less than 100° C., less than 95° C., less than 90° C., or less than 85° C. In some embodiments, the temperature is between 50° C. to 60° C., between 60° C. to 70° C., between 70° C. to 80° C., between 80° C. to 90° C., between 50-100, or between 90° C. to 100° C. In some embodiments, the method comprises expressing a fusion polypeptide comprising an insoluble carrier polypeptide (e.g., an onconase polypeptide or a TAF12 polypeptide) operably linked to two or more polypeptides by a peptide bond. In some embodiments, the peptide bond is capable of sequence-specific chemical cleavage. In some embodiments, the two or more oligopeptides are operably linked to the insoluble carrier polypeptide (e.g., an onconase polypeptide or a TAF12 polypeptide) by a peptide bond comprising an Asp-Pro bond and the sequence-specific chemical cleavage is with formic acid or acetic acid.

[0273] In some embodiments, the inclusion bodies are incubated with acetic acid at a temperature of greater than 50° C. for at least one hour. The acetic acid concentration may be at least two percent by weight, at least three percent by weight, at least four percent by weight, or at least five percent by weight. In some embodiments, the acetic acid concentration is less than fifty percent by weight, less than forty-five percent by weight, less than forty percent by weight, less than thirty-five percent by weight, or less than thirty percent by weight. In some embodiments, the acetic acid concentration is less than fifty percent by weight, less than forty-five percent by weight, less than forty percent by weight, less than thirty-five percent by weight, or less than thirty percent by weight. In some embodiments, the acetic acid concentration is less than fifty percent by weight, less than forty-five percent by weight, less than forty percent by weight, less than thirty-five percent by weight, or less than thirty percent by weight. In some embodiments, the acetic acid concentration is between ten to twenty percent by weight, between twenty to thirty percent by weight, between thirty to forty percent by weight, or between forty to fifty percent by weight. In some embodiments, the inclusion bodies are incubated for 1-24 hours in acetic acid. In some embodiments, the inclusion bodies are incubated in acetic acid between 2 to 4 hours, between 4 to 6 hours, between 6 to 8 hours, between 8 to 10 hours, between 10 to 14 hours, between 14 to 18 hours, between 18 to 20 hours, or between 20 to 24 hours. In some embodiments, the inclusion bodies are incubated in acetic acid for about 2 hours, about 4 hours, about 6 hours, about 8 hours, about 10 hours, about 12 hours, about 14 hours, about 16 hours, about 18 hours, about 20 hours or about 24 hours. In some embodiments, the inclusion bodies are incubated in acetic acid for up to 20 hours. In some embodiments, the method comprises expressing a fusion polypeptide comprising an insoluble carrier polypeptide (e.g., an onconase polypeptide or a TAF12 polypeptide) operably linked to two or more polypeptides by a peptide bond. In some embodiments, the peptide bond is capable of sequence-specific chemical cleavage. In some embodiments, the two or more oligopeptides are operably linked to the insoluble carrier polypeptide (e.g., an onconase polypeptide or a TAF12 polypeptide) by a peptide bond comprising an Asp-Pro bond and the sequence-specific chemical cleavage is with formic acid or acetic acid.

[0274] In some embodiments, the method of purifying inclusion bodies comprises expressing the fusion protein in a cell, purifying the inclusion bodies, and incubating the inclusion bodies with acetic acid, further comprises releasing the two or more oligopeptides from the insoluble carrier polypeptide, which forms inclusion bodies in a cell by sequence-specific chemical cleavage. In some embodiments, releasing the two or more oligopeptides from the insoluble carrier polypeptide, which forms inclusion bodies in a cell is performed using an acid. In some embodiments, the acid is acetic acid or formic acid. In some embodiments, releasing the two or more oligopeptides from the insoluble carrier polypeptide (e.g., an onconase polypeptide or a TAF12 polypeptide) by sequence-specific acetic acid cleavage of the peptide bond. In some embodiments, cleavage of the fusion polypeptide by acetic acid results in the release of the insoluble carrier polypeptide, which forms inclusion bodies in a cell from the two or more polypeptides and/or the release of the two or more oligopeptides from each other. In some embodiments, releasing the two or more oligopeptides from the insoluble carrier polypeptide, which forms inclusion bodies in a cell occurs after solubilization of the inclusion bodies. In some embodiments, releasing the two or more oligopeptides from the insoluble carrier polypeptide, which forms inclusion bodies in a cell occurs during incubation of the inclusion bodies in acetic acid. In some embodiments, the release of the peptides is not complete. For example, in some embodiments, dipeptides or tripeptides remain after incubation with acetic acid or formic acid.

[0275] In some embodiments, the method further comprises separating the released oligopeptides from the insoluble carrier polypeptide, which forms inclusion bodies in a cell. After the release step, the oligopeptides may be separated and/or isolated from the insoluble carrier polypeptide, which forms inclusion bodies based on a differential solubility of the components. Parameters such as pH, salt concentration, and temperature may be adjusted to facilitate separation of the oligopeptides from the insoluble carrier polypeptide, which forms inclusion bodies. The released oligopeptide may be further purified using any known purification techniques in the art such, for example, as ion exchange, gel purification techniques, differential centrifugation, and column chromatography.

[0276] In some embodiments, the method of purifying inclusion bodies comprises expressing the fusion protein in a cell, purifying the inclusion bodies, and incubating the inclusion bodies with acetic acid, wherein the fusion polypeptide comprises expressing the fusion polypeptide in conditions that promote the formation of inclusion bodies. In some embodiments, the step of expressing the fusion polypeptide is performed at neutral pH. In some embodiments, expressing the fusion polypeptide at neutral pH results in the formation of inclusion bodies. In some embodiments, the step of expressing the fusion polypeptide is performed at high temperatures. In some embodiments, expressing the fusion polypeptide at high temperature results in the formation of inclusion bodies. In some embodiments, expressing the fusion polypeptide at high levels results in the formation of inclusion bodies. In some embodiments, the step of expressing the fusion polypeptide is performed using a cell that is prone to formation of inclusion bodies. In some embodiments, expressing the fusion polypeptide in a cell that is prone to formation of inclusion bodies results in the formation of inclusion bodies.

[0277] In some embodiments, provided herein is a method of purifying inclusion bodies comprising a fusion protein, wherein the fusion protein comprises an insoluble carrier polypeptide (e.g., an onconase polypeptide or a TAF12 polypeptide) operably linked to two or more oligopeptides. In some embodiments, the method comprises expressing a fusion polypeptide comprising an insoluble carrier polypeptide (e.g., an onconase polypeptide or a TAF12 polypeptide) operably linked to two or more polypeptides by a peptide bond. In some embodiments, the peptide bond is capable of sequence-specific chemical cleavage. In some embodiments, the two or more oligopeptides are operably linked to the insoluble carrier polypeptide (e.g., an onconase polypeptide or a TAF12 polypeptide) by a peptide bond comprising an Asp-Pro bond and the sequence-specific chemical cleavage is with formic acid or acetic acid.

[0278] In some embodiments, the method of purifying inclusion bodies comprising a fusion protein comprises expressing a fusion polypeptide comprising two or more, three or more oligopeptides, four or more oligopeptides, five or more oligopeptides, six or more polypeptides, eight or more polypeptides, ten or more polypeptides, fifteen or more polypeptides, or twenty or more oligopeptides operably linked to the insoluble carrier polypeptide (e.g., an onconase polypeptide or a TAF12 polypeptide). In some embodiments, the method comprises expressing a fusion polypeptide comprising an insoluble carrier polypeptide (e.g., an onconase polypeptide or a TAF12 polypeptide) and two or more oligopeptides operably linked to the N-terminus or the C-terminus of the onconase protein. In some embodiments, the method comprises expressing a fusion polypeptide comprising an insoluble carrier polypeptide (e.g., an onconase polypeptide or a TAF12 polypeptide) and two or more oligopeptides are linked to the C-terminus of the onconase. In some embodiments, two or more oligopeptides linked to the C-terminus of the onconase have the same amino acid sequence. In some embodiments, two or more oligopeptides linked to the C-terminus of the onconase have a different amino acid sequence. In some embodiments, the method comprises expressing a fusion polypeptide comprising an insoluble carrier polypeptide (e.g., an onconase polypeptide or a TAF12 polypeptide) and two or more oligopeptides are linked to the N-terminus of the onconase. In some embodiments, the two or more oligopeptides linked to the N-terminus of the onconase have the same amino acid sequence. In some embodiments, the two or more oligopeptides linked to the N-terminus of the onconase have a different amino acid sequence. In some embodiments, the inclusion bodies are solubilized in the absence of a chaotropic agent. In some embodiments, the onconase is an onconase mutant. In some embodiments the onconase mutant comprises one or more amino acid substitutions, insertions, or deletions in the 15 N-terminal amino acids.

[0279] In some embodiments, the method of purifying inclusion bodies comprises expressing the fusion protein in a cell, purifying the inclusion bodies, and incubating the inclusion bodies with acetic acid at, for example, a temperature of at least 50° C. for at least an hour, wherein the fusion polypeptide comprises two or more oligopeptides that are less than 25 amino acids in length. In some embodiments, the two or more oligopeptides are at least four, at least five, at least six, at least seven, at least eight, at least nine, at least ten, at least fifteen, at least twenty, or at least twenty-five amino acids long. In some embodiments, the two or more oligopeptides are up to fifty amino acids in length. In some embodiments, the two or more oligopeptides are less than fifty, less than forty-five, less than forty, less than thirty-five, less than thirty, less than twenty-five, or less than twenty amino acids long. In some embodiments, the two or more oligopeptides are between four and fifty, between six and forty amino acids long, between six and thirty amino acids long, or between eight and twenty-five amino acids long. In some embodiments, the inclusion bodies are solubilized in the absence of a chaotropic agent. In some embodiments, the inclusion bodies are incubated with acetic acid at a temperature of greater than 50° C. for at least one hour.

[0280] In some embodiments, the method of purifying inclusion bodies comprises expressing the fusion protein in a cell, purifying the inclusion bodies, and incubating the inclusion bodies with acetic acid, wherein the fusion polypeptide comprises an insoluble carrier polypeptide (e.g., an onconase polypeptide or a TAF12 polypeptide) linked to two or more micropeptides (miPEPs). In some embodiments, the two or more oligopeptides comprise a miPEP sequence that regulates a miRNA. In some embodiments, the two or more oligopeptides comprise a miPEP sequence that regulates two or more miRNA families. In some embodiments, the two or more oligopeptides comprise a miPEP sequence that regulates a plant miRNA. In some embodiments, the two or more oligopeptides comprise a miPEP sequence that regulates a plant miRNA selected from the group consisting of the miR156, miR159/319, miR160, miR162, miR164, miR166, miR167, miR168, miR169, miR171, miR172, miR390, miR393, miR394, miR295, miR396, miR397, miR398, miR408, miR403, miR437, miR444, and miR445 families. In some embodiments, the one or more oligopeptides comprise a miPEP sequence that has microbe inhibiting activity. In some embodiments, the onconase is a variant onconase. In some embodiments, the two or more oligopeptides are 4-50 or 5-30 amino acids long. In some embodiments, the fusion polypeptide is expressed in a yeast or bacterial cell. In some embodiments, the inclusion bodies are solubilized in the absence of a chaotropic agent. In some embodiments, the inclusion bodies are incubated with acetic acid at a temperature of greater than 50° C. for at least one hour.

[0281] In some embodiments, the method of purifying inclusion bodies comprises expressing the fusion protein in a cell, purifying the inclusion bodies, and incubating the inclusion bodies with acetic acid, wherein the fusion polypeptide further comprises a linker sequence between the two or more oligopeptides and/or between the insoluble carrier polypeptide (e.g., an onconase polypeptide or a TAF12 polypeptide) and the oligopeptides. In some embodiments, the linker sequence is capable of being cleaved by sequence-specific chemical cleavage. In some embodiments, the linker sequence separates the two or more oligopeptides and/or a linker sequence separating the insoluble carrier polypeptide (e.g., an onconase polypeptide or a TAF12 polypeptide) from the two or more oligopeptides. In some embodiments, the linker sequence separating the two or more oligopeptides has the same or different sequence than the linker sequence separating the insoluble carrier polypeptide (e.g., an onconase polypeptide or a TAF12 polypeptide) from the two or more oligopeptides. In some embodiments, the method comprises expressing a fusion polypeptide comprising a linker sequence comprising the amino acid sequence of SEQ ID NO: 11 separating the two or more oligopeptides and/or separating the insoluble carrier polypeptide (e.g., an onconase polypeptide or a TAF12 polypeptide) from the two or more oligopeptides. In some embodiments, the method comprises expressing a fusion polypeptide comprising a linker sequence comprising an Asp-Pro linker separating the two or more oligopeptides and/or separating the insoluble carrier polypeptide (e.g., an onconase polypeptide or a TAF12 polypeptide) from the two or more oligopeptides. In some embodiments, the inclusion bodies are solubilized in the absence of a chaotropic agent. In some embodiments, the inclusion bodies are incubated with acetic acid at a temperature of greater than 50° C. for at least one hour.

[0282] In some embodiments, the method of purifying inclusion bodies comprises expressing the fusion protein in a cell, purifying the inclusion bodies, and incubating the inclusion bodies with acetic acid, wherein the fusion polypeptide comprises an onconase polypeptide comprising the amino acid sequence of SEQ ID NO: 1 operably linked to two or more oligopeptides by a peptide bond. In some embodiments, the method comprises expressing a fusion polypeptide comprising an onconase polypeptide comprising an amino acid sequence that has at least 80%, at least 85%, at least 90%, at least 91%, at least 92%, at least 93%, at least 94%, at least 95%, at least 96%, at least 97%, at least 98%, or at least 99% sequence identity to SEQ ID NO: 1. In some embodiments, the method comprises expressing a fusion polypeptide comprising an onconase polypeptide comprising an amino acid sequence that has between 80% to 85%, 85% to 90%, 90% to 95%, or 95% to 100% sequence identity to SEQ ID NO: 1. In some embodiments, the method comprises expressing a fusion polypeptide comprising a variant onconase comprising one or more amino acid substitutions as compared to the amino acid sequence of SEQ ID NO: 1. In some embodiments, the method comprises expressing a fusion polypeptide comprising an onconase polypeptide comprising one or more insertions or deletions as compared to the amino acid sequence of SEQ ID NO: 1. The one or more insertions or deletions may be of any amino acid length. In some embodiments, the inclusion bodies are solubilized in the absence of a chaotropic agent. In some embodiments, the inclusion bodies are incubated with acetic acid at a temperature of greater than 50° C. for at least one hour.

[0283] In some embodiments, the method of purifying inclusion bodies comprises expressing the fusion protein in a cell, purifying the inclusion bodies, and incubating the inclusion bodies with acetic acid, wherein the fusion polypeptide comprises an onconase polypeptide with one or more amino acid substitutions that decrease susceptibility to chemical cleavage as compared to an onconase polypeptide having the amino acid sequence of SEQ ID NO: 1. In some embodiments, the method comprises expressing a fusion polypeptide comprising an onconase polypeptide with one or more deletions or insertions that reduce susceptibility to chemical cleavage as compared to an onconase polypeptide having the amino acid sequence of SEQ ID NO: 1. In some embodiments, the inclusion bodies are solubilized in the absence of a chaotropic agent. In some embodiments, the inclusion bodies are incubated with acetic acid at a temperature of greater than 50° C. for at least one hour.

[0284] In some embodiments, the method of purifying inclusion bodies comprises expressing the fusion protein in a cell, purifying the inclusion bodies, and incubating the inclusion bodies with acetic acid, wherein the fusion polypeptide comprises an onconase polypeptide with a modified N-terminus and/or C-terminus. In some embodiments, the method comprises expressing a fusion polypeptide comprising an onconase polypeptide one or more amino acid substitution in the N-terminus and/or C-terminus as compared to SEQ ID NO: 1. In some embodiments, the method comprises expressing a fusion polypeptide comprising an onconase polypeptide comprising 11 amino acid substitutions in the N-terminus and/or C-terminus as compared to SEQ ID NO: 1. In some embodiments, the method comprises expressing a fusion polypeptide comprising an onconase polypeptide 11 amino acid substitutions in the N-terminus as compared to SEQ ID NO: 1. In some embodiments, the inclusion bodies are solubilized in the absence of a chaotropic agent. In some embodiments, the inclusion bodies are incubated with acetic acid at a temperature of greater than 50° C. for at least one hour.

[0285] In some embodiments, the method of purifying inclusion bodies comprises expressing the fusion protein in a cell, purifying the inclusion bodies, and incubating the inclusion bodies with acetic acid, wherein the fusion polypeptide comprises a TAF12 polypeptide comprising the amino acid sequence of SEQ ID NO: 23 operably linked to two or more oligopeptides by a peptide bond. In some embodiments, the method comprises expressing a fusion polypeptide comprising a TAF12 polypeptide comprising an amino acid sequence that has at least 80%, at least 85%, at least 90%, at least 91%, at least 92%, at least 93%, at least 94%, at least 95%, at least 96%, at least 97%, at least 98%, or at least 99% sequence identity to SEQ ID NO: 23. In some embodiments, the method comprises expressing a fusion polypeptide comprising a TAF12 polypeptide comprising an amino acid sequence that has between 80% to 85%, 85% to 90%, 90% to 95%, or 95% to 100% sequence identity to SEQ ID NO: 23. In some embodiments, the method comprises expressing a fusion polypeptide comprising a variant TAF12 comprising one or more amino acid substitutions as compared to the amino acid sequence of SEQ ID NO: 23. In some embodiments, the method comprises expressing a fusion polypeptide comprising a TAF12 polypeptide comprising one or more insertions or deletions as compared to the amino acid sequence of SEQ ID NO: 23. The one or more insertions or deletions may be of any amino acid length. In some embodiments, the inclusion bodies are solubilized in the absence of a chaotropic agent. In some embodiments, the inclusion bodies are incubated with acetic acid at a temperature of greater than 50° C. for at least one hour.

[0286] In some embodiments, the method of purifying inclusion bodies comprises expressing the fusion protein in a cell, purifying the inclusion bodies, and incubating the inclusion bodies with acetic acid, wherein the fusion polypeptide comprises a TAF12 polypeptide with one or more amino acid substitutions that decrease susceptibility to chemical cleavage as compared to a TAF12 polypeptide having the amino acid sequence of SEQ ID NO: 23. In some embodiments, the method comprises expressing a fusion polypeptide comprising a TAF12 polypeptide with one or more deletions or insertions that reduce susceptibility to chemical cleavage as compared to a TAF12 polypeptide having the amino acid sequence of SEQ ID NO: 23. In some embodiments, the inclusion bodies are solubilized in the absence of a chaotropic agent. In some embodiments, the inclusion bodies are incubated with acetic acid at a temperature of greater than 50° C. for at least one hour.

[0287] In some embodiments, the method of purifying inclusion bodies comprises expressing the fusion protein in a cell, purifying the inclusion bodies, and incubating the inclusion bodies with acetic acid, wherein the fusion polypeptide comprises a TAF12 polypeptide with a modified N-terminus and/or C-terminus. In some embodiments, the method comprises expressing a fusion polypeptide comprising a TAF12 polypeptide one or more amino acid substitution in the N-terminus and/or C-terminus as compared to SEQ ID NO: 23. In some embodiments, the method comprises expressing a fusion polypeptide comprising a TAF12 polypeptide comprising 11 amino acid substitutions in the N-terminus and/or C-terminus as compared to SEQ ID NO: 23. In some embodiments, the method comprises expressing a fusion polypeptide comprising a TAF12 polypeptide 11 amino acid substitutions in the N-terminus as compared to SEQ ID NO: 23. In some embodiments, the inclusion bodies are solubilized in the absence of a chaotropic agent. In some embodiments, the inclusion bodies are incubated with acetic acid at a temperature of greater than 50° C. for at least one hour.

### III. Methods of Purifying Inclusion Bodies Comprising a Fusion Protein.

[0288] Some aspects of the present disclosure provide for methods of purifying inclusion bodies comprising a fusion protein. In some embodiments, the method comprises expressing a fusion protein comprising an oligopeptide operably linked to a protein that forms inclusion bodies (such as an onconase), lysing a cell to form a lysate, centrifuging the cell lysate to form a pellet, washing the pellet in a surfactant buffer, washing the pellet in a salt buffer, and washing the pellet in water. In some embodiments, the method comprises purifying inclusion bodies formed by a fusion protein comprising an onconase fused to two or more oligopeptides. In some embodiments, the fusion protein is expressed in bacteria or yeast. In some embodiments, the fusion protein comprises a cleavable Asp-Pro bond. In some embodiments, the oligopeptides are 4-50 or 5-30 amino acids long. In some embodiments, the onconase is an onconase mutant.

[0289] In some embodiments, the method of purifying inclusion bodies comprising a fusion polypeptide comprises lysing the cell to form a lysate. Cell lysis may be performed through any methods known to those skilled in the art. In some embodiments, cell lysis is performed by enzymatic lysis. Methods for enzymatic lysis include, but are not limited to, enzymatic lysis using lytic enzymes such as lysozyme, lysostaphin, mutanolysin, or any other enzyme that disrupts a cell wall. In some embodiments, cell lysis is performed by mechanical methods. Methods of mechanical lysis include without limitation, physical shearing, such as with glass beads, sonication, French press, ultrasound, incubation with a hypotonic solution, or high pressure. In some embodiments, the cell lysate is a yeast or bacterial cell lysate. In some embodiments, the fusion protein comprises an onconase fused to two or more oligopeptides. In some embodiments, the oligopeptides are 4-50 or 5-30 amino acids long. In some embodiments, the onconase is a variant onconase.

[0290] In some embodiments, the method of purifying inclusion bodies comprising a fusion protein comprises centrifuging the cell lysate to form a pellet. In some embodiments, centrifugation is performed at a speed of about 500×g, about, 1,000×g, about 5,000×g, about 10,000×g, about 15,000×g, about 20,000×g, or about 25,000×g. In some embodiments, centrifugation is performed at a speed of between 500×g to 1,000×g, 1,000×g to 5,000×g, 5,000×g to 10,000×g, 10,000×g to 15,000×g, 15,000×g to 20,000×g, or 20,000×g to 25,000×g. In some embodiments, centrifugation is performed at a speed of about 10,000×g. In some embodiments, centrifugation is performed at a temperature of about 4° to 10° C. In some embodiments, centrifugation is performed at room temperature. In some embodiments, centrifugation is performed for about 5 to 60 minutes. In some embodiments, centrifugation is performed for about 5 to 10 minutes, about 10 to 15 minutes, about 15 to 30 minutes, about 30 to 45 minutes, or about 45 to 60 minutes. In some embodiments, centrifugation is performed for about 5 minutes, about 10 minutes, about 15 minutes, about 20 minutes, about 30 minutes, about 45 minutes or about 60 minutes. In some embodiments, centrifugation is performed for longer than 60 minutes. In some embodiments, centrifugation of the cell lysate results in a pellet comprising inclusion bodies. In some embodiments, centrifugation of the cell lysate results in a pellet that is free of cell debris. In some embodiments, the cell lysate is a yeast or bacterial cell lysate. In some embodiments, the fusion protein comprises an onconase fused to two or more oligopeptides. In some embodiments, the oligopeptides are 4-50 or 5-30 amino acids long. In some embodiments, the onconase is a variant onconase.

[0291] In some embodiments, the method of purifying inclusion bodies comprising a fusion protein comprises washing the pellet in a surfactant buffer. A surfactant is a surface active compound which reduces the surface tension of water and includes, nonionic (including, but not limited to, t-octylphenoxypolyethoxy-ethanol and polyoxyethylene sorbitan), anionic (e.g., sodium dodecyl sulfate) and cationic (e.g., cetylpyridinium chloride) and amphoteric agents. Suitable surfactants include, but are not limited to deoxycholate, sodium octyl sulfate, sodium tetradecyl sulfate, polyoxyethylene ethers, sodium cholate, octylthioglucopyranoside, n-octylglucopyranoside, alkyltrimethylammonium bromides, alkyltrimethyl ammonium chlorides, sodium bis(2-ethylhexyl)sulfosuccinate. In some embodiments, the surfactant buffer comprises a nonionic surfactant. In some embodiments, the surfactant is TritonX-100. In some embodiments, the pellet is washed at least once, at least twice, or at least three times with the surfactant. In some embodiments, the pellet is washed more than three times with the surfactant. In some embodiments, the fusion protein comprises an insoluble carrier polypeptide (e.g., an onconase polypeptide or a TAF12 polypeptide) operably linked to two or more oligopeptides by an Asp-Pro bond. In some embodiments, the oligopeptides are 4-50 or 5-30 amino acids long. In some embodiments, the onconase is a variant onconase.

[0292] In some embodiments, the purified inclusion bodies incubated at about 95° C. following washing with the surfactant. In some embodiments the incubation denatures the proteins in the inclusion bodies. In some embodiments, the incubation is carried out for at least 1, at least 2, at least 3 at least 5, at least 10 or at least 20 minutes. In some embodiments, the incubation is carried out for 1-20 minutes. In some embodiments, the incubation is at between about 90° C. to about 100° C.

[0293] In some embodiments, the method of purifying inclusion bodies comprising a fusion protein comprises washing the pellet in a buffer with salt. In some embodiments, the buffer has a high salt level. Such buffers are advantageous for disaggregating and/or refolding mixtures and to maintain a desired pH value or pH range. Inorganic salt buffers (e.g., phosphate, carbonate, sodium, among others) and organic salt buffers (e.g., citrate, Tris, MOPS, MES, HEPES, among others) are well known to the art. In some embodiments, the salt buffer comprises NaCl. In some embodiments, the salt buffer comprises at least 0.5M NaCl. In some embodiments, the salt buffer is at least 0.6M NaCl, at least 0.7M NaCl, at least 0.75M NaCl, or at least 1 M NaCl. In some embodiments, the salt buffer is between 0.1M to 0.6 M NaCl, between 0.6M to 0.7M NaCl, between 0.7M to 0.8M NaCl, between 0.8M to 0.9M NaCl, or between 0.9M to 1M NaCl. In some embodiments, the pellet is washed with the buffer at least once, at least twice, or at least three times. In some embodiments, the pellet is washed with the buffer more than three times. In some embodiments, the fusion protein comprises an onconase fused to two or more oligopeptides. In some embodiments, the oligopeptides are 4-50 or 5-30 amino acids long. In some embodiments, the onconase is a variant onconase. In some embodiments, the purified inclusion bodies are incubated at 95° C. following washing with the buffer.

[0294] In some embodiments, the method of purifying inclusion bodies comprising a fusion protein further comprises washing the pellet in water. Washing a pellet with water may remove or diminish any remaining impurities, as well as any remaining salt or surfactants molecules in the solution. In some embodiments, the pellet is washed in water at least once, at least twice, or at least three times. In some embodiments, the pellet is washed in water more than three times. In some embodiments, washing the pellet with water leads to purified inclusion bodies. In some embodiments, the fusion protein comprises an onconase fused to two or more oligopeptides. In some embodiments, the oligopeptides are 4-50 or 5-30 amino acids long. In some embodiments, the onconase is a variant onconase. In some embodiments, the purified inclusion bodies are incubated at 95° C. following washing with water.

[0295] In some embodiments, the method of purifying inclusion bodies comprising a fusion protein comprises further comprises solubilizing the inclusion bodies. Solubilization may be performed in the presence or absence of a chaotropic agent (e.g., urea or guanidinium hydrochloride) or on the absence of a chaotropic agent. In some embodiments, method of purifying inclusion bodies comprising a fusion protein further comprises solubilizing the inclusion bodies in a chaotropic agent-free solution. In some embodiments, method of purifying inclusion bodies comprising a fusion protein further comprises solubilizing the inclusion bodies in a solution comprising a chemical cleavage reagent. In some embodiments, method of purifying inclusion bodies comprising a fusion protein further comprises solubilizing the inclusion bodies in a solution comprising acidic acid or formic acid. In some embodiments, the inclusion bodies are solubilized in acetic acid. In some embodiments, the inclusion bodies comprise a fusion protein which comprises an onconase fused to two or more oligopeptides. In some embodiments, the oligopeptides are 4-50 or 5-30 amino acids long. In some embodiments, the onconase is a variant onconase.

[0296] In some embodiments, the method of purifying inclusion bodies comprising a fusion protein comprises purifying the inclusion bodies. Suitable techniques for purification include, but are not limited to, ammonium sulfate or ethanol precipitation, acid extraction, electrophoresis, immunoadsorption, anion or cation exchange chromatography, phosphocellulose chromatography, hydrophobic interaction chromatography, affinity chromatography, immunoaffinity chromatography, size exclusion chromatography, liquid chromatography (LC), high performance LC (HPLC), fast performance LC (FPLC), hydroxyapatite chromatography and lectin chromatography. In some embodiments, the method of purifying inclusion bodies comprising a fusion protein further comprises purifying the inclusion bodies by chromatography. In some embodiments, the method of purifying inclusion bodies comprising a fusion protein does not comprise purifying the inclusion bodies by chromatography.

[0297] In some embodiments, the method of purifying inclusion bodies comprising a fusion protein comprises expressing a fusion protein comprising an oligopeptide operably linked to a protein that forms inclusion bodies in a cell. The protein that forms inclusion bodies in a cell may be any insoluble carrier polypeptide, which forms inclusion bodies in a cell. In some embodiments, the protein that forms inclusion bodies in a cell is an onconase. In some embodiments, the inclusion bodies comprise a fusion polypeptide comprising an insoluble carrier polypeptide (e.g., an onconase polypeptide or a TAF12 polypeptide) operably linked to one or more polypeptides by a peptide bond. In some embodiments, the peptide bond is capable of sequence-specific chemical cleavage. In some embodiments, the oligopeptide is 4-50 or 5-30 amino acids long. In some embodiments, the fusion protein comprises a cleavable Asp-Pro bond.

[0298] In some embodiments, the method of purifying inclusion bodies comprising a fusion protein comprises purifying inclusion bodies comprising a fusion polypeptide comprising an insoluble carrier polypeptide (e.g., an onconase polypeptide or a TAF12 polypeptide) operably linked to two or more oligopeptide. In some embodiments, the fusion protein comprises two or more, three or more oligopeptides, four or more oligopeptides, five or more oligopeptides, six or more polypeptides, eight or more polypeptides, ten or more polypeptides, fifteen or more polypeptides, or twenty or more oligopeptides operably linked to the insoluble carrier polypeptide (e.g., an onconase polypeptide or a TAF12 polypeptide). In some embodiments, the inclusion bodies comprise a fusion polypeptide comprising an insoluble carrier polypeptide (e.g., an onconase polypeptide or a TAF12 polypeptide) and one or more oligopeptides operably linked to the N-terminus or the C-terminus of the onconase protein. In some embodiments, the inclusion bodies comprise a fusion polypeptide comprising an insoluble carrier polypeptide (e.g., an onconase polypeptide or a TAF12 polypeptide) and one or more oligopeptides are linked to the C-terminus of the onconase. In some embodiments, one or more oligopeptides linked to the C-terminus of the onconase have the same amino acid sequence. In some embodiments, one or more oligopeptides linked to the C-terminus of the onconase have a different amino acid sequence. In some embodiments, the inclusion bodies comprise a fusion polypeptide comprising an insoluble carrier polypeptide (e.g., an onconase polypeptide or a TAF12 polypeptide) and one or more oligopeptides are linked to the N-terminus of the onconase. In some embodiments, one or more oligopeptides linked to the N-terminus of the onconase have the same amino acid sequence. In some embodiments, one or more oligopeptides linked to the N-terminus of the onconase have a different amino acid sequence. In some embodiments, the onconase is a variant onconase.

[0299] In some embodiments, the method of purifying inclusion bodies comprising a fusion protein comprises purifying inclusion bodies comprising a fusion polypeptide comprising an oligopeptide operably linked to a protein that forms inclusion bodies in a cell, wherein the operable linkage is a chemically cleavable amino acid sequence. In some embodiments, the two or more oligopeptides are 4-50 or 5-30 amino acids long. In some embodiments, the inclusion bodies comprise a fusion polypeptide comprising one or more oligopeptides that are less than 25 amino acids in length. In some embodiments, the one or more oligopeptides are at least four, at least five, at least six, at least seven, at least eight, at least nine, at least ten, at least fifteen, at least twenty, or at least twenty-five amino acids long. In some embodiments, the one or more oligopeptides are up to fifty amino acids in length. In some embodiments, the one or more oligopeptides are less than fifty, less than forty-five, less than forty, less than thirty-five, less than thirty, less than twenty-five, or less than twenty amino acids long. In some embodiments, the one or more oligopeptides are between four and fifty, between six and forty amino acids long, between six and thirty amino acids long, or between eight and twenty-five amino acids long. In some embodiments, the fusion polypeptide comprises a cleavable Asp-Pro bond. In some embodiments, the method comprises lysing the cell to form a lysate, centrifuging the cell lysate to form a pellet, and washing the pellet in a surfactant buffer comprising a nonionic surfactant.

[0300] In some embodiments, the method of purifying inclusion bodies comprising a fusion protein comprises purifying inclusion bodies comprising a fusion polypeptide comprising an insoluble carrier polypeptide (e.g., an onconase polypeptide or a TAF12 polypeptide) linked to one or more micropeptides (miPEPs). In some embodiments, the one or more oligopeptides comprise a miPEP sequence that regulates one or more miRNA families. In some embodiments, the one or more oligopeptides comprise a miPEP sequence that regulates a plant miRNA family. In some embodiments, the method comprises lysing the cell to form a lysate, centrifuging the cell lysate to form a pellet, and washing the pellet in a surfactant buffer comprising a nonionic surfactant.

[0301] In some embodiments, the method of purifying inclusion bodies comprising a fusion protein comprises purifying inclusion bodies comprising a fusion polypeptide further comprising a linker sequence. In some embodiments, the linker sequence is capable of being cleaved by sequence-specific chemical cleavage. In some embodiments, the linker sequence separates the one or more oligopeptides and/or a linker sequence separating the insoluble carrier polypeptide (e.g., an onconase polypeptide or a TAF12 polypeptide) from the one or more oligopeptides. In some embodiments, the linker sequence separating the one or more oligopeptides has the same or different sequence than the linker sequence separating the insoluble carrier polypeptide (e.g., an onconase polypeptide or a TAF12 polypeptide) from the one or more oligopeptides. In some embodiments, the inclusion bodies comprise a fusion polypeptide comprising a linker sequence comprising the amino acid sequence of SEQ ID NO: 11 separating the one or more oligopeptides and/or separating the insoluble carrier polypeptide (e.g., an onconase polypeptide or a TAF12 polypeptide) from the one or more oligopeptides. In some embodiments, the inclusion bodies comprise a fusion polypeptide comprising a linker sequence comprising an Asp-Pro linker separating the one or more oligopeptides and/or separating the insoluble carrier polypeptide (e.g., an onconase polypeptide or a TAF12 polypeptide) from the one or more oligopeptides. In some embodiments, the method comprises lysing the cell to form a lysate, centrifuging the cell lysate to form a pellet, and washing the pellet in a surfactant buffer comprising a nonionic surfactant.

[0302] In some embodiments, the method of purifying inclusion bodies comprising a fusion protein comprises purifying inclusion bodies comprising a fusion polypeptide comprising an onconase polypeptide comprising the amino acid sequence of SEQ ID NO: 1 operably linked to one or more oligopeptides by a peptide bond. In some embodiments, the inclusion bodies comprise a fusion polypeptide comprising an onconase polypeptide comprising an amino acid sequence that has at least 80%, at least 85%, at least 90%, at least 91%, at least 92%, at least 93%, at least 94%, at least 95%, at least 96%, at least 97%, at least 98%, or at least 99% sequence identity to SEQ ID NO: 1. In some embodiments, the one or more oligopeptides are 4-50 or 5-30 amino acids long. In some embodiments, the fusion protein comprises a cleavable Asp-Pro bond.

[0303] In some embodiments, the methods comprise purifying inclusion bodies comprising a fusion polypeptide comprising a variant onconase comprising one or more amino acid substitutions as compared to the amino acid sequence of SEQ ID NO: 1 operably linked to one or more oligopeptides. In some embodiments, the inclusion bodies comprise a fusion polypeptide comprising an onconase polypeptide comprising one or more insertions or deletions as compared to the amino acid sequence of SEQ ID NO: 1. In some embodiments, the method of purifying inclusion bodies comprising a fusion protein comprises purifying inclusion bodies comprising a fusion polypeptide comprising an onconase polypeptide with one or more amino acid substitutions that decrease susceptibility to chemical cleavage as compared to an onconase polypeptide having the amino acid sequence of SEQ ID NO: 1. In some embodiments, the inclusion bodies comprise a fusion polypeptide comprising an onconase polypeptide with one or more deletions or insertions that reduce susceptibility to chemical cleavage as compared to an onconase polypeptide having the amino acid sequence of SEQ ID NO: 1. In some embodiments, the inclusion bodies comprise a fusion polypeptide comprising an onconase polypeptide with one or more amino acid substitutions that increase yield or promote formation of inclusion bodies as compared to an onconase polypeptide having the amino acid sequence of SEQ ID NO: 1. In some embodiments, the inclusion bodies comprise a fusion polypeptide comprising an onconase polypeptide with one or more deletions or insertions that increase yield or promote formation of inclusion bodies as compared to an onconase polypeptide having the amino acid sequence of SEQ ID NO: 1. In some embodiments, the method comprises lysing the cell to form a lysate, centrifuging the cell lysate to form a pellet, and washing the pellet in a surfactant buffer comprising a nonionic surfactant.

[0304] In some embodiments, the inclusion bodies comprise a fusion polypeptide comprising an onconase polypeptide comprising the amino acid sequence of any one of SEQ ID NOs: 2-10 and 15-22, optionally with one, two, three, four, five or all six C-terminal histidine residues deleted as shown in FIG. 20A. In some embodiments, the inclusion bodies comprise a fusion polypeptide comprising an onconase polypeptide comprising an amino acid sequence that has at least 80%, at least 85%, at least 90%, at least 91%, at least 92%, at least 93%, at least 94%, at least 95%, at least 96%, at least 97%, at least 98%, or at least 99% sequence identity to any of SEQ ID NOs: 2-10 and 15-22, optionally with one, two, three, four, five or all six C-terminal histidine residues deleted as shown in FIG. 20A. In some embodiments, the fusion polypeptide comprises an onconase polypeptide comprising an amino acid sequence that has between 80% to 85%, 85% to 90%, 90% to 95%, or 95% to 100% sequence identity with any one of SEQ ID NOs: 2-10 and 15-22, optionally with one, two, three, four, five or all six C-terminal histidine residues deleted as shown in FIG. 20A. In some embodiments, the one or more oligopeptides are 4-50 or 5-30 amino acids long. In some embodiments, the fusion protein comprises a cleavable Asp-Pro bond. In some embodiments, the method comprises lysing the cell to form a lysate, centrifuging the cell lysate to form a pellet, and washing the pellet in a surfactant buffer comprising a nonionic surfactant.

[0305] In some embodiments, the inclusion bodies comprise a fusion polypeptide comprising an onconase polypeptide with a modified N-terminus and/or C-terminus operably linked to one or more oligopeptides. In some embodiments, the inclusion bodies comprise a fusion polypeptide comprising an onconase polypeptide one or more amino acid substitution in the N-terminus and/or C-terminus as compared to SEQ ID NO: 1. In some embodiments, the inclusion bodies comprise a fusion polypeptide comprising an onconase polypeptide comprising 11 amino acid substitutions in the N-terminus and/or C-terminus as compared to SEQ ID NO: 1. In some embodiments, the inclusion bodies comprise a fusion polypeptide comprising an onconase polypeptide 11 amino acid substitutions in the N-terminus as compared to SEQ ID NO: 1. In some embodiments, the one or more oligopeptides are 4-50 or 5-30 amino acids long. In some embodiments, the fusion protein comprises a cleavable Asp-Pro bond. In some embodiments, the method comprises lysing the cell to form a lysate, centrifuging the cell lysate to form a pellet, and washing the pellet in a surfactant buffer comprising a nonionic surfactant.

[0306] In some embodiments, the method of purifying inclusion bodies comprising a fusion protein comprises purifying inclusion bodies comprising a fusion polypeptide comprising a TAF12 polypeptide comprising the amino acid sequence of SEQ ID NO: 23 operably linked to one or more oligopeptides by a peptide bond. In some embodiments, the inclusion bodies comprise a fusion polypeptide comprising a TAF12 polypeptide comprising an amino acid sequence that has at least 80%, at least 85%, at least 90%, at least 91%, at least 92%, at least 93%, at least 94%, at least 95%, at least 96%, at least 97%, at least 98%, or at least 99% sequence identity to SEQ ID NO: 23. In some embodiments, the one or more oligopeptides are 4-50 or 5-30 amino acids long. In some embodiments, the fusion protein comprises a cleavable Asp-Pro bond.

[0307] In some embodiments, the methods comprise purifying inclusion bodies comprising a fusion polypeptide comprising a variant TAF12 comprising one or more amino acid substitutions as compared to the amino acid sequence of SEQ ID NO: 23 operably linked to one or more oligopeptides. In some embodiments, the inclusion bodies comprise a fusion polypeptide comprising a TAF12 polypeptide comprising one or more insertions or deletions as compared to the amino acid sequence of SEQ ID NO: 23. In some embodiments, the method of purifying inclusion bodies comprising a fusion protein comprises purifying inclusion bodies comprising a fusion polypeptide comprising a TAF12 polypeptide with one or more amino acid substitutions that decrease susceptibility to chemical cleavage as compared to a TAF12 polypeptide having the amino acid sequence of SEQ ID NO: 23. In some embodiments, the inclusion bodies comprise a fusion polypeptide comprising a TAF12 polypeptide with one or more deletions or insertions that reduce susceptibility to chemical cleavage as compared to a TAF12 polypeptide having the amino acid sequence of SEQ ID NO: 23. In some embodiments, the inclusion bodies comprise a fusion polypeptide comprising a TAF12 polypeptide with one or more amino acid substitutions that increase yield or promote formation of inclusion bodies as compared to a TAF12 polypeptide having the amino acid sequence of SEQ ID NO: 23. In some embodiments, the inclusion bodies comprise a fusion polypeptide comprising a TAF12 polypeptide with one or more deletions or insertions that increase yield or promote formation of inclusion bodies as compared to a TAF12 polypeptide having the amino acid sequence of SEQ ID NO: 23. In some embodiments, the method comprises lysing the cell to form a lysate, centrifuging the cell lysate to form a pellet, and washing the pellet in a surfactant buffer comprising a nonionic surfactant.

[0308] In some embodiments, the inclusion bodies comprise a fusion polypeptide comprising a TAF12 polypeptide with a modified N-terminus and/or C-terminus operably linked to one or more oligopeptides. In some embodiments, the inclusion bodies comprise a fusion polypeptide comprising a TAF12 polypeptide one or more amino acid substitution in the N-terminus and/or C-terminus as compared to SEQ ID NO: 23. In some embodiments, the inclusion bodies comprise a fusion polypeptide comprising a TAF12 polypeptide comprising 11 amino acid substitutions in the N-terminus and/or C-terminus as compared to SEQ ID NO: 23. In some embodiments, the inclusion bodies comprise a fusion polypeptide comprising a TAF12 polypeptide 11 amino acid substitutions in the N-terminus as compared to SEQ ID NO: 23. In some embodiments, the one or more oligopeptides are 4-50 or 5-30 amino acids long. In some embodiments, the fusion protein comprises a cleavable Asp-Pro bond. In some embodiments, the method comprises lysing the cell to form a lysate, centrifuging the cell lysate to form a pellet, and washing the pellet in a surfactant buffer comprising a nonionic surfactant.

### IV. Onconase Polypeptides

[0309] Also provided herein are onconase polypeptides for use as insoluble carrier peptides.

[0310] Onconase, also known as ranpirnase, is an RNAse that was first identified in Rana pipiens. Onconase is a protein of about 104 amino acids in length, stabilized by four disulfide bridges, and undergoes pH-dependent denaturation. Without being limited by theory, acidic conditions promote denaturation of onconase, and the denatured form onconase is highly soluble, and efficient renaturation can only be achieved by a method based on reversible blocking of cysteine residues. At neutral conditions (around pH 7), onconase is prone to aggregation, and high yield production of onconase can lead to formation of insoluble aggregates, such as inclusion bodies, with low to undetectable soluble levels of the protein. Once aggregated, the onconase may be removed from a solution by selective precipitation. Moreover, onconase lacks any aspartate-proline and asparagine-glycine sequences, which makes it resistant to common chemical cleavage strategies.

[0311] In some embodiments, the onconase polypeptide comprises the amino acid sequence of SEQ ID NO: 1. In some embodiments, the onconase polypeptide comprises an amino acid sequence that has at least 80%, at least 85%, at least 90%, at least 91%, at least 92%, at least 93%, at least 94%, at least 95%, at least 96%, at least 97%, at least 98%, or at least 99% sequence identity to SEQ ID NO: 1. In some embodiments, the onconase polypeptide comprises an amino acid sequence that has between 80% to 85%, 85% to 90%, 90% to 95%, or 95% to 100% sequence identity to SEQ ID NO: 1. In some embodiments, the onconase polypeptide is a truncated onconase polypeptide. In some embodiments, the truncation is at the N-terminus.

[0312] In some embodiments, the onconase polypeptide has one or more amino acid substitutions that decrease its pI. In some embodiments, the onconase polypeptide has a pI of about 8.0, about 7.5, about 7.0, or about 6.5. In some embodiments, the onconase polypeptide has a neutral pI. In some embodiments, the onconase polypeptide has a pI of less than 7.0.

[0313] In some embodiments, the onconase polypeptide comprises one or more amino acid substitutions compared to the amino acid sequence of SEQ ID NO: 1. In some embodiments, the one or more amino acid substitutions are conservative amino acid substitutions. In some embodiments, the one or more amino acid substitutions are non-conservative amino acid substitutions. In some embodiments, the fusion protein comprises an onconase polypeptide comprising one or more insertions or deletions as compared to the amino acid sequence of SEQ ID NO: 1. In some embodiments, the onconase polypeptide is inactive.

[0314] In some embodiments, the onconase polypeptide comprises one or more amino acid substitutions that decrease susceptibility to chemical cleavage as compared to an onconase polypeptide having the amino acid sequence of SEQ ID NO: 1. In some embodiments, the onconase polypeptide comprises one or more deletions or insertions that reduce susceptibility to chemical cleavage as compared to an onconase polypeptide having the amino acid sequence of SEQ ID NO: 1. In some embodiments, the onconase polypeptide has 1, 2, 3, 4, 5, 6, 7, 8, 9, 10, 11, 12, 13, 14, 15, 16, 17, 18, 19, 20 or more amino acid substitutions, insertions, or deletions compared to an onconase polypeptide having the amino acid sequence of SEQ ID NO: 1.

[0315] In some embodiments, the onconase polypeptide comprises one or more amino acid substitutions that increase yield or promote formation of inclusion bodies as compared to an onconase polypeptide having the amino acid sequence of SEQ ID NO: 1. In some embodiments, the onconase polypeptide comprises one or more amino acid substitutions that increase yield or promote formation of inclusion bodies comprise one or more substitutions of cationic or polar amino acids for non-polar or neutral amino acids. In some embodiments, the one or more amino acid substitutions result in a variant onconase polypeptide that has a decreased number of cationic or polar amino acids as compared to an onconase polypeptide having the amino acid sequence of SEQ ID NO: 1. In some embodiments, the onconase polypeptide comprises one or more deletions or insertions that increase yield or promote formation of inclusion bodies as compared to an onconase polypeptide having the amino acid sequence of SEQ ID NO: 1. In some embodiments, the one or more insertions or deletions that increase yield or promote formation of inclusion bodies result in a variant onconase having a decreased number of cationic or polar amino acids as compared to an onconase polypeptide having the amino acid sequence of SEQ ID NO: 1.

[0316] In some embodiments, the onconase polypeptide comprises mutation of one or more charged or polar amino acids to a non-polar amino acid. In some embodiments, the onconase polypeptide comprises one or more alanine substitutions. In some embodiments, the onconase polypeptide comprises one or more lysine to alanine substitutions. In some embodiments, the onconase polypeptide comprises 2, 3, 4, 5, 6, 7, 8, 9, or 10 alanine substitutions. In some embodiments, the onconase polypeptide does not contain lysine residues. In some embodiments, the onconase polypeptide does not contain arginine residues. In some embodiments, the onconase polypeptide does not contain lysine or arginine residues.

[0317] In some embodiments, the onconase polypeptide comprises a modified N-terminus and/or C-terminus. In some embodiments, the onconase polypeptide comprises one or more amino acid substitution in the N-terminus and/or C-terminus as compared to SEQ ID NO: 1. In some embodiments, the onconase polypeptide comprises 11 amino acid substitutions in the N-terminus and/or C-terminus as compared to SEQ ID NO: 1. In some embodiments, the onconase polypeptide comprises 11 amino acid substitutions in the N-terminus as compared to SEQ ID NO: 1.

[0318] In some embodiments, the onconase polypeptide comprises the amino acid sequence of any one of SEQ ID NOs: 2-10, optionally with one, two, three, four, five or all six C-terminal histidine residues deleted as shown in FIG. 20A. In some embodiments, the onconase polypeptide comprises an amino acid sequence that has at least 80%, at least 85%, at least 90%, at least 91%, at least 92%, at least 93%, at least 94%, at least 95%, at least 96%, at least 97%, at least 98%, or at least 99% sequence identity to the amino acid sequence set forth in SEQ ID NO: 2. In some embodiments, the onconase polypeptide comprises an amino acid sequence that has at least 80%, at least 85%, at least 90%, at least 91%, at least 92%, at least 93%, at least 94%, at least 95%, at least 96%, at least 97%, at least 98%, or at least 99% sequence identity to the amino acid sequence set forth in SEQ ID NO: 3. In some embodiments, the onconase polypeptide comprises an amino acid sequence that has at least 80%, at least 85%, at least 90%, at least 91%, at least 92%, at least 93%, at least 94%, at least 95%, at least 96%, at least 97%, at least 98%, or at least 99% sequence identity to the amino acid sequence set forth in SEQ ID NO: 4. In some embodiments, the onconase polypeptide comprises an amino acid sequence that has at least 80%, at least 85%, at least 90%, at least 91%, at least 92%, at least 93%, at least 94%, at least 95%, at least 96%, at least 97%, at least 98%, or at least 99% sequence identity to the amino acid sequence set forth in SEQ ID NO: 5. In some embodiments, the onconase polypeptide comprises an amino acid sequence that has at least 80%, at least 85%, at least 90%, at least 91%, at least 92%, at least 93%, at least 94%, at least 95%, at least 96%, at least 97%, at least 98%, or at least 99% sequence identity to the amino acid sequence set forth in SEQ ID NO: 6. In some embodiments the onconase polypeptide comprises an amino acid sequence that has at least 80%, at least 85%, at least 90%, at least 91%, at least 92%, at least 93%, at least 94%, at least 95%, at least 96%, at least 97%, at least 98%, or at least 99% sequence identity to the amino acid sequence set forth in SEQ ID NO: 7. In some embodiments, the onconase polypeptide comprises an amino acid sequence that has at least 80%, at least 85%, at least 90%, at least 91%, at least 92%, at least 93%, at least 94%, at least 95%, at least 96%, at least 97%, at least 98%, or at least 99% sequence identity to the amino acid sequence set forth in SEQ ID NO: 7. In some embodiments the onconase polypeptide comprises an amino acid sequence that has at least 80%, at least 85%, at least 90%, at least 91%, at least 92%, at least 93%, at least 94%, at least 95%, at least 96%, at least 97%, at least 98%, or at least 99% sequence identity to the amino acid sequence set forth in SEQ ID NO: 8. In some embodiments, the onconase polypeptide comprises an amino acid sequence that has at least 80%, at least 85%, at least 90%, at least 91%, at least 92%, at least 93%, at least 94%, at least 95%, at least 96%, at least 97%, at least 98%, or at least 99% sequence identity to the amino acid sequence set forth in SEQ ID NO: 9. In some embodiments, the onconase polypeptide comprises an amino acid sequence that has at least 80%, at least 85%, at least 90%, at least 91%, at least 92%, at least 93%, at least 94%, at least 95%, at least 96%, at least 97%, at least 98%, or at least 99% sequence identity to the amino acid sequence set forth in SEQ ID NO: 10. In each case, the above may optionally have one, two, three, four, five or all six C-terminal histidine residues deleted as shown in FIG. 20A.

[0319] In some embodiments, the onconase polypeptide comprises an amino acid sequence tag. In some embodiments, the amino acid sequence tag is a purification amino acid sequence tag. In some embodiments, the amino acid sequence tag is a detection amino acid sequence tag. In some embodiments, the tag is less than 20 amino acids in length, less than 10 amino acids in length, or less than 5 amino acids in length. In some embodiments, the tag is 5-20 amino acids in length. In some embodiments, the tag is a hexahistidine or FLAG tag. In some embodiments, the tag is a biotin tag.

[0320] In some embodiments, the onconase polypeptide has increased expression levels as compared to an onconase polypeptide having the amino acid sequence of SEQ ID NO: 1. Expression levels can be measured by any standard techniques known in the art. For instance, the amount of protein (in grams) can be compared to the amount in grams of total cell protein in a given sample, with the measurement determined as a level of recombinant protein per liter. The level or amount can also be measured as compared to a known standard, such as a BSA control. Other techniques to measure protein levels include without limitation, light absorption analysis of a purified protein samples, antibody-based detection (e.g., western blot, FACS, immunofluorescence), activity measurements, and microscopy analysis (e.g., phase contrast, Nomarski interference, electron or fluorescence microscopy). The level or activity can also be compared to a known standard (such as a known amount of purified, active protein) for more accurate quantification.

[0321] Also provided herein are compositions comprising an onconase mutant polypeptide described herein.

### V. Fusion Polypeptides

[0322] Provided herein are also fusion polypeptides comprising a polypeptide that can form inclusion bodies and one or more oligopeptides. Any of the polypeptides that form inclusion bodies disclosed herein may be used. In some embodiments, the polypeptide that forms inclusion bodies is an insoluble carrier polypeptide (e.g., an onconase polypeptide or a TAF12 polypeptide). In some embodiments, the carrier is a variant carrier. In some embodiments, the fusion polypeptide comprises an insoluble carrier polypeptide (e.g., an onconase polypeptide or a TAF12 polypeptide) operably linked to one or more oligopeptides. In some embodiments, the one or more oligopeptides are operably linked to the insoluble carrier polypeptide (e.g., an onconase polypeptide or a TAF12 polypeptide) by a cleavable bond. In some embodiments, the one or more oligopeptides are 4-50 or 5-30 amino acids long. In some embodiments, the fusion protein comprises a cleavable Asp-Pro bond.

[0323] In some embodiments, the fusion polypeptide comprises two or more, three or more oligopeptides, four or more oligopeptides, five or more oligopeptides, six or more polypeptides, eight or more polypeptides, ten or more polypeptides, fifteen or more polypeptides, or twenty or more oligopeptides operably linked to the insoluble carrier polypeptide (e.g., an onconase polypeptide or a TAF12 polypeptide). In some embodiments, the fusion polypeptide comprises an insoluble carrier polypeptide (e.g., an onconase polypeptide or a TAF12 polypeptide) and one or more oligopeptides are operably linked to the N-terminus and/or the C-terminus of the onconase protein. In some embodiments, the one or more oligopeptides are each 4-50 or 5-30 amino acids long.

[0324] In some embodiments, the fusion polypeptide comprises an insoluble carrier polypeptide (e.g., an onconase polypeptide or a TAF12 polypeptide) and one or more oligopeptides operably linked to the N-terminus or the C-terminus of the onconase protein. In some embodiments, the fusion polypeptide comprises three or more oligopeptides, four or more oligopeptides, five or more oligopeptides, six or more polypeptides, eight or more polypeptides, ten or more polypeptides, fifteen or more polypeptides, or twenty or more oligopeptides operably linked to N-terminus and/or the C-terminus of the insoluble carrier polypeptide (e.g., an onconase polypeptide or a TAF12 polypeptide). In some embodiments, the fusion polypeptide comprises an insoluble carrier polypeptide (e.g., an onconase polypeptide or a TAF12 polypeptide) and one or more oligopeptides are linked to the C-terminus of the onconase. In some embodiments, one or more oligopeptides linked to the C-terminus of the onconase have the same amino acid sequence. In some embodiments, one or more oligopeptides linked to the C-terminus of the onconase have a different amino acid sequence. In some embodiments, the fusion polypeptide comprises an insoluble carrier polypeptide (e.g., an onconase polypeptide or a TAF12 polypeptide) and one or more oligopeptides are linked to the N-terminus of the onconase. In some embodiments, one or more oligopeptides linked to the N-terminus of the onconase have the same amino acid sequence. In some embodiments, one or more oligopeptides linked to the N-terminus of the onconase have a different amino acid sequence.

[0325] In some embodiments, the fusion polypeptide comprises an insoluble carrier polypeptide (e.g., an onconase polypeptide or a TAF12 polypeptide) operably linked to the one or more oligopeptides by a cleavable peptide bond. The cleavable bond may be cleaved by enzymatic or chemical agents. Cleavage of the peptide bond may result in separation of the insoluble carrier polypeptide (e.g., an onconase polypeptide or a TAF12 polypeptide) from the oligopeptides and/or of the oligopeptides from each other. In some embodiments, the peptide bond can be cleaved by enzymatic cleavage. In some embodiments, the peptide bond is capable of sequence-specific chemical cleavage. In some embodiments, the peptide bond includes (i) a methionine and the sequence-specific chemical cleavage is with cyanogen bromide, (ii) a tryptophan and the sequence-specific chemical cleavage is with BNPS-skatole, (iii) an aspartic acid-proline (Asp-Pro) bond and the sequence-specific chemical cleavage is with formic acid, (iv) an asparagine-glycine bond and the sequence-specific chemical cleavage is with hydroxylamine, or (v) a cysteine and the sequence-specific chemical cleavage is with NTCB. In some embodiments, the one or more oligopeptides are operably linked to the insoluble carrier polypeptide (e.g., an onconase polypeptide or a TAF12 polypeptide) by a peptide bond comprising an Asp-Pro bond and the sequence-specific chemical cleavage is with formic acid or acetic acid.

[0326] In some embodiments, the fusion polypeptide comprises an insoluble carrier polypeptide (e.g., an onconase polypeptide or a TAF12 polypeptide) operably linked to one or more oligopeptides that are 4-50 or 5-30 amino acids long. In some embodiments, the one or more oligopeptides are less than 25 amino acids in length. In some embodiments, the one or more oligopeptides are at least four, at least five, at least six, at least seven, at least eight, at least nine, at least ten, at least fifteen, at least twenty, or at least twenty-five amino acids long. In some embodiments, the one or more oligopeptides are up to fifty amino acids in length. In some embodiments, the one or more oligopeptides are less than fifty, less than forty-five, less than forty, less than thirty-five, less than thirty, less than twenty-five, or less than twenty amino acids long. In some embodiments, the one or more oligopeptides are between four and fifty, between six and forty amino acids long, between six and thirty amino acids long, or between eight and twenty-five amino acids long. In some embodiments, the one or more oligopeptides are operably linked to each other by an Asp-Pro bond. In some embodiments, the operable linkage between the insoluble carrier polypeptide (e.g., an onconase polypeptide or a TAF12 polypeptide) and the one or more oligopeptides comprises an Asp-Pro bond. In some embodiments, the insoluble carrier polypeptide (e.g., an onconase polypeptide or a TAF12 polypeptide) is a variant onconase.

[0327] In some embodiments, fusion polypeptide comprises an insoluble carrier polypeptide (e.g., an onconase polypeptide or a TAF12 polypeptide) operably linked to one or more oligopeptides comprise the amino acid sequence of any one of SEQ ID NOs: 12-14 and 31-2401. In some embodiments, the one or more oligopeptides comprise an amino acid sequence that has at least 80%, at least 85%, at least 90%, at least 91%, at least 92%, at least 93%, at least 94%, at least 95%, at least 96%, at least 97%, at least 98%, or at least 99% sequence identity with any one of SEQ ID NOs: 12-14 and 31-2401. In some embodiments, the one or more oligopeptides comprise an amino acid sequence that has between 80% to 85%, 85% to 90%, 90% to 95%, or 95% to 100% sequence identity with any one of SEQ ID NOs: 12-14 and 31-2401. In some embodiments, the one or more oligopeptides are 4-50 or 5-30 amino acids in length. In some embodiments, the onconase is a variant onconase. In some embodiments, the operable linkage comprises an Asp-Pro bond.

[0328] In some embodiments, the fusion polypeptide comprises an insoluble carrier polypeptide (e.g., an onconase polypeptide or a TAF12 polypeptide) linked to one or more micropeptides (miPEPs). In some embodiments, the one or more oligopeptides comprise a miPEP sequence that regulates a miRNA. In some embodiments, the one or more oligopeptides comprise a miPEP sequence that regulates a plant miRNA, a fungal miRNA, or a metazoan miRNA. In some embodiments, the one or more oligopeptides comprise a miPEP sequence that regulates a plant miRNA. In some embodiments, the one or more oligopeptides comprise a miPEP sequence that regulates a plant miRNA selected from the group consisting of the miR156, miR159/319, miR160, miR162, miR164, miR166, miR167, miR168, miR169, miR171, miR172, miR390, miR393, miR394, miR295, miR396, miR397, miR398, miR408, miR403, miR437, miR444, and miR445 families. In some embodiments, the one or more oligopeptides comprise a miPEP sequence that has microbe inhibiting activity. In some embodiments, the one or more oligopeptides are 4-50 or 5-30 amino acids in length. In some embodiments, the onconase is a variant onconase. In some embodiments, the operable linkage comprises an Asp-Pro bond.

[0329] In some embodiments, the fusion polypeptide further comprises a linker sequence between the one or more oligopeptides and/or between the insoluble carrier polypeptide (e.g., an onconase polypeptide or a TAF12 polypeptide) and the oligopeptides. The linker sequence may function as a spacer peptide to separate the one or more oligopeptides and/or the insoluble carrier polypeptide (e.g., an onconase polypeptide or a TAF12 polypeptide) and oligopeptides. In some embodiments, the linker sequence provides the cleavable peptide bond. For instance, the linker sequence may provide the cleavable peptide bond by incorporation an amino acid sequence that directs the sequence-specific cleavage of the fusion polypeptide. In some embodiments, the linker sequence is capable of being cleaved by sequence-specific chemical cleavage. In some embodiments, the fusion polypeptide comprises a linker sequence separating the one or more oligopeptides and/or a linker sequence separating the insoluble carrier polypeptide (e.g., an onconase polypeptide or a TAF12 polypeptide) from the one or more oligopeptides. In some embodiments, the linker sequence separating the one or more oligopeptides has the same or different sequence than the linker sequence separating the insoluble carrier polypeptide (e.g., an onconase polypeptide or a TAF12 polypeptide) from the one or more oligopeptides. In some embodiments, the fusion polypeptide comprises a linker sequence comprising the amino acid sequence of SEQ ID NO: 11 separating the one or more oligopeptides and/or separating the insoluble carrier polypeptide (e.g., an onconase polypeptide or a TAF12 polypeptide) from the one or more oligopeptides. In some embodiments, the fusion polypeptide comprises a linker sequence comprising an Asp-Pro linker separating the one or more oligopeptides and/or separating the insoluble carrier polypeptide (e.g., an onconase polypeptide or a TAF12 polypeptide) from the one or more oligopeptides. In some embodiments, sequence-specific chemical cleavage of the linker sequence results in the release of the insoluble carrier polypeptide (e.g., an onconase polypeptide or a TAF12 polypeptide) from the one or more oligopeptides and/or of the one or more oligopeptides from each other.

[0330] In some embodiments, the fusion polypeptide further comprises one or more amino acid sequence tags. In some embodiments, the amino acid sequence tag does not affect the solubility of the fusion polypeptide. In some embodiments, the amino acid sequence tag has a neutral pI. In some embodiments, the one or more amino acid sequence tags are purification amino acid sequence tags. Such tag peptides may include, but are not limited to, glutathione-S-transferase (GST), polyhistidine, maltose binding protein (MBP), avidin, biotin, streptavidin, histidine (His) tags (e.g. His-6X tag), V5 tags, FLAG tags, influenza hemagglutinin (HA) tags, Myc tags, VSV-G tags, thioredoxin (Trx) tags, and ligands for cellular receptor (e.g., insulin receptor ligands). In some embodiments, the one or more amino acid sequence tags sequence is a detection or reporter amino acid sequence tag. Examples of reporter amino acid sequence tag include without limitation horseradish peroxidase (HRP), chloramphenicol acetyltransferase (CAT) beta-galactosidase, beta-glucuronidase, luciferase, and fluorescent proteins (e.g., GFP, CFP, YFP, BFP, etc.). In some embodiments, the one or more amino acid sequence tags are operably linked to the N-terminus and/or C-terminus of the insoluble carrier polypeptide (e.g., an onconase polypeptide or a TAF12 polypeptide) or the one or more oligopeptides. In some embodiments, the one or more amino acid sequence tags are operably linked to the C-terminus of the insoluble carrier polypeptide (e.g., an onconase polypeptide or a TAF12 polypeptide) and the N-terminus of the one or more oligopeptides. In some embodiments, the one or more amino acid sequence tags are operably linked to the C-terminus of the insoluble carrier polypeptide (e.g., an onconase polypeptide or a TAF12 polypeptide) and the N-terminus of the one or more oligopeptides. In some embodiments, the one or more amino acid sequence tags are operably linked to the C-terminus of one oligopeptide and the N-terminus of another oligopeptide.

[0331] In some embodiments, the fusion polypeptide comprises an onconase polypeptide comprising the amino acid sequence of SEQ ID NO: 1 operably linked to one or more oligopeptides by a peptide bond. In some embodiments, the fusion polypeptide comprises an onconase polypeptide comprising an amino acid sequence that has at least 80%, at least 85%, at least 90%, at least 91%, at least 92%, at least 93%, at least 94%, at least 95%, at least 96%, at least 97%, at least 98%, or at least 99% sequence identity to SEQ ID NO: 1. In some embodiments, the onconase polypeptide an amino acid sequence that has between 80% to 85%, 85% to 90%, 90% to 95%, or 95% to 100% sequence identity with any one of SEQ ID NO: 1. In some embodiments, the onconase polypeptide is a variant onconase polypeptide.

[0332] In some embodiments, the fusion polypeptide comprises a variant onconase polypeptide operably linked to one or more oligopeptides by a peptide bond. In some embodiments, the variant onconase comprises one or more amino acid substitutions as compared to the amino acid sequence of SEQ ID NO: 1. In some embodiments, the fusion protein comprises an onconase polypeptide comprising one or more insertions or deletions as compared to the amino acid sequence of SEQ ID NO: 1. The one or more insertions or deletions may be of any amino acid length.

[0333] In some embodiments, the fusion protein comprises an onconase polypeptide with one or more amino acid substitutions that decrease susceptibility to chemical cleavage as compared to an onconase polypeptide having the amino acid sequence of SEQ ID NO: 1. In some embodiments, the fusion protein comprises an onconase polypeptide with one or more deletions or insertions that reduce susceptibility to chemical cleavage as compared to an onconase polypeptide having the amino acid sequence of SEQ ID NO: 1.

[0334] In some embodiments, the fusion protein comprises an onconase polypeptide with one or more amino acid substitutions that increase yield or promote formation of inclusion bodies as compared to an onconase polypeptide having the amino acid sequence of SEQ ID NO: 1. In some embodiments, the one or more amino acid substitutions that increase yield or promote formation of inclusion bodies comprise one or more substitutions of cationic or polar amino acids for non-polar or neutral amino acids. In some embodiments, the one or more amino acid substitutions result in a variant onconase polypeptide having a decreased number of cationic or polar amino acids as compared to an onconase polypeptide having the amino acid sequence of SEQ ID NO: 1. In some embodiments, the fusion protein comprises an onconase polypeptide with one or more deletions or insertions that increase yield or promote formation of inclusion bodies as compared to an onconase polypeptide having the amino acid sequence of SEQ ID NO: 1. In some embodiments, the one or more insertions or deletions that increase yield or promote formation of inclusion bodies result in a variant onconase having a decreased number of cationic or polar amino acids as compared to an onconase polypeptide having the amino acid sequence of SEQ ID NO: 1. In some embodiments, the one or more oligopeptides are 4-50 or 5-30 amino acids in length. In some embodiments, the operable linkage comprises an Asp-Pro bond.

[0335] In some embodiments, the fusion protein comprises an onconase polypeptide comprising the amino acid sequence of any one of SEQ ID NOs: 2-10 and 15-22 operably linked to one or more oligopeptides, optionally with one, two, three, four, five or all six C-terminal histidine residues deleted as shown in FIG. 20A. In some embodiments, the fusion protein comprises an onconase polypeptide comprising an amino acid sequence that has at least 80%, at least 85%, at least 90%, at least 91%, at least 92%, at least 93%, at least 94%, at least 95%, at least 96%, at least 97%, at least 98%, or at least 99% sequence identity to any of SEQ ID NOs: 2-10 and 15-22, optionally with one, two, three, four, five or all six C-terminal histidine residues deleted as shown in FIG. 20A. In some embodiments, the onconase polypeptide comprises an amino acid sequence that has between 80% to 85%, 85% to 90%, 90% to 95%, or 95% to 100% sequence identity to SEQ ID NOs: 2-10 and 15-22, optionally with one, two, three, four, five or all six C-terminal histidine residues deleted as shown in FIG. 20A. In some embodiments, the onconase polypeptide comprises one or more amino acid substitution compared to SEQ ID NO: 1. In some embodiments, the onconase polypeptide comprises one or more deletions or insertions compared to SEQ ID NO: 1. In some embodiments, the one or more oligopeptides are 4-50 or 5-30 amino acids in length. In some embodiments, the operable linkage comprises an Asp-Pro bond.

[0336] In some embodiments, the fusion polypeptide comprises an onconase polypeptide with a modified N-terminus and/or C-terminus operably linked to one or more oligopeptides. In some embodiments, the fusion polypeptide comprises an onconase polypeptide one or more amino acid substitution in the N-terminus and/or C-terminus as compared to SEQ ID NO: 1. In some embodiments, the fusion polypeptide comprises an onconase polypeptide comprising 11 amino acid substitutions in the N-terminus and/or C-terminus as compared to SEQ ID NO: 1. In some embodiments, the fusion polypeptide comprises an onconase polypeptide 11 amino acid substitutions in the N-terminus as compared to SEQ ID NO: 1. In some embodiments, the one or more oligopeptides are 4-50 or 5-30 amino acids in length. In some embodiments, the operable linkage comprises an Asp-Pro bond.

[0337] In some embodiments, the fusion polypeptide comprises a TAF12 polypeptide comprising the amino acid sequence of SEQ ID NO: 23 operably linked to one or more oligopeptides by a peptide bond. In some embodiments, the fusion polypeptide comprises a TAF12 polypeptide comprising an amino acid sequence that has at least 80%, at least 85%, at least 90%, at least 91%, at least 92%, at least 93%, at least 94%, at least 95%, at least 96%, at least 97%, at least 98%, or at least 99% sequence identity to SEQ ID NO: 23. In some embodiments, the TAF12 polypeptide an amino acid sequence that has between 80% to 85%, 85% to 90%, 90% to 95%, or 95% to 100% sequence identity with any one of SEQ ID NO: 23. In some embodiments, the TAF12 polypeptide is a variant TAF12 polypeptide.

[0338] In some embodiments, the fusion polypeptide comprises a variant TAF12 polypeptide operably linked to one or more oligopeptides by a peptide bond. In some embodiments, the variant TAF12 comprises one or more amino acid substitutions as compared to the amino acid sequence of SEQ ID NO: 23. In some embodiments, the fusion protein comprises a TAF12 polypeptide comprising one or more insertions or deletions as compared to the amino acid sequence of SEQ ID NO: 23. The one or more insertions or deletions may be of any amino acid length.

[0339] In some embodiments, the fusion protein comprises a TAF12 polypeptide with one or more amino acid substitutions that decrease susceptibility to chemical cleavage as compared to a TAF12 polypeptide having the amino acid sequence of SEQ ID NO: 23. In some embodiments, the fusion protein comprises a TAF12 polypeptide with one or more deletions or insertions that reduce susceptibility to chemical cleavage as compared to a TAF12 polypeptide having the amino acid sequence of SEQ ID NO: 23.

[0340] In some embodiments, the fusion protein comprises a TAF12 polypeptide with one or more amino acid substitutions that increase yield or promote formation of inclusion bodies as compared to a TAF12 polypeptide having the amino acid sequence of SEQ ID NO: 23. In some embodiments, the one or more amino acid substitutions that increase yield or promote formation of inclusion bodies comprise one or more substitutions of cationic or polar amino acids for non-polar or neutral amino acids. In some embodiments, the one or more amino acid substitutions result in a variant TAF12 polypeptide having a decreased number of cationic or polar amino acids as compared to a TAF12 polypeptide having the amino acid sequence of SEQ ID NO: 23. In some embodiments, the fusion protein comprises a TAF12 polypeptide with one or more deletions or insertions that increase yield or promote formation of inclusion bodies as compared to a TAF12 polypeptide having the amino acid sequence of SEQ ID NO: 23. In some embodiments, the one or more insertions or deletions that increase yield or promote formation of inclusion bodies result in a variant TAF12 having a decreased number of cationic or polar amino acids as compared to a TAF12 polypeptide having the amino acid sequence of SEQ ID NO: 23. In some embodiments, the one or more oligopeptides are 4-50 or 5-30 amino acids in length. In some embodiments, the operable linkage comprises an Asp-Pro bond.

[0341] In some embodiments, the TAF12 polypeptide comprises one or more amino acid substitution compared to SEQ ID NO: 23. In some embodiments, the TAF12 polypeptide comprises one or more deletions or insertions compared to SEQ ID NO: 23. In some embodiments, the one or more oligopeptides are 4-50 or 5-30 amino acids in length. In some embodiments, the operable linkage comprises an Asp-Pro bond.

[0342] In some embodiments, the fusion polypeptide comprises a TAF12 polypeptide with a modified N-terminus and/or C-terminus operably linked to one or more oligopeptides. In some embodiments, the fusion polypeptide comprises a TAF12 polypeptide one or more amino acid substitution in the N-terminus and/or C-terminus as compared to SEQ ID NO: 23. In some embodiments, the fusion polypeptide comprises a TAF12 polypeptide comprising 11 amino acid substitutions in the N-terminus and/or C-terminus as compared to SEQ ID NO: 23. In some embodiments, the fusion polypeptide comprises a TAF12 polypeptide 11 amino acid substitutions in the N-terminus as compared to SEQ ID NO: 23. In some embodiments, the one or more oligopeptides are 4-50 or 5-30 amino acids in length. In some embodiments, the operable linkage comprises an Asp-Pro bond.

[0343] In some embodiments, the fusion polypeptide is expressed in a cell or cell culture. Any cell or cell culture known to produce inclusion bodies is suitable for expression of the fusion peptide. In some embodiments, the fusion polypeptide is expressed in a bacteria. In some embodiments, the bacteria is a strain of Escherichia coli or Vibrio natriegens. In some embodiments, the bacteria is an E. coli strain. In some embodiments, the bacterial cell is a strain that lacks Lon and ompT protease function (e.g. a BL21 E. coli strain). In some embodiments, the fusion polypeptide is a yeast cell. In some embodiments, the yeast cell is a strain of Pichia pastoris. In some embodiments, the fusion polypeptide is produced by any of the methods disclosed herein.

### VI. Oligopeptides

[0344] Provided herein are oligopeptides comprising an active amino acid sequence. In some embodiments, the active amino acid sequence is 4-50 or 5-30 amino acids long. In some embodiments, the active amino acid sequence is a micropeptide (miPEPs). In some embodiments, the oligopeptide comprise an active amino acid sequence and an N-terminal proline, a C-terminal aspartic acid, or both the N-terminal proline and the C-terminal aspartic acid. miPEPs are short peptides (7-44 amino acids long) defined by one or several short open reading frames located in the pri-microRNA sequence of a specific miRNA member. Without being limited by theory, miPEPs are thought to target the microRNA that encodes them at the transcriptional level, modulating the expression of the target pri-microRNA to either upregulate or downregulate transcription. miPEPs may target miRNAs involved various processes, such as miRNAs involved in immunity and susceptibility to a pathogen (e.g., a microbe), organogenesis, response to stress, embryonic development, etc.

[0345] In some embodiments, the oligopeptide comprises a miPEP sequence that regulates a miRNA. Each miPEP may regulate one or more members or a particular miRNA family, and in a particular species. The miPEP sequence may regulate a plant miRNA, or a metazoan miRNA. In some embodiments, the miPEP sequence regulates one or more members of a particular miRNA family. In some embodiments, the miPEP sequence regulates a plant miRNA. Exemplary plant microRNA families that may be regulated by miPEPs include, but are not limited to, plant miRNA families miR156, miR159/319, miR160, miR162, miR164, miR166, miR167, miR168, miR169, miR171, miR172, miR390, miR393, miR394, miR295, miR396, miR397, miR398, miR408, miR403, miR437, miR444, and miR445. In some embodiments, the miPEP sequence comprises an N-terminal proline, a C-terminal aspartic acid, or both the N-terminal proline and the C-terminal aspartic acid. In some embodiments, the miPEP sequence has microbe inhibiting activity.

[0346] In some embodiments, the oligopeptide comprises an active amino acid sequence that has microbe inhibiting activity. In other embodiments, the oligopeptide comprises a peptide microbial inhibitor. In some embodiments, the oligopeptide inhibits a microbe. In some embodiments, the microbe is a virus, a bacteria, a fungi, an amoeba, or an eukaryote. Exemplary targets of microbes with may be inhibited by the oligopeptides, include, but are not limited to, microbes from the genera Venturia, Podosphaera, Erysiphe, Monolinia, Mycosphaerella, Uncinula, Hemileia, Rhizoctonia, Puccinia, Botrytis, Helminthosporium, Rhynchosporium, Fusarium, Septoria, Cercospora, Alternaria, Pyricularia, Pseudocercosporella, Phytophthora, Peronospora Bremia, Pythium, Plasmopara, Scleropthora, Peronosclerospora, Physopella, Cercospora, Colletotrichum, Gibberell, Exserohilum, Bacillus, Richoderna, Kabateillu, Bipolaris, Pseudomonas, Pseudomonas Erwinia, Mycoplasma, and Rickettsia. In some embodiments, the oligopeptide comprises an active amino acid sequence and an N-terminal proline, a C-terminal aspartic acid, or both the N-terminal proline and the C-terminal aspartic acid.

[0347] In some embodiments, the oligopeptide is less than 25 amino acids in length. In some embodiments, the oligopeptide is at least four, at least five, at least six, at least seven, at least eight, at least nine, at least ten, at least fifteen, at least twenty, or at least twenty-five amino acids long. In some embodiments, the oligopeptide is up to fifty amino acids in length. In some embodiments, the oligopeptide is less than fifty, less than forty-five, less than forty, less than thirty-five, less than thirty, less than twenty-five, or less than twenty amino acids long. In some embodiments, the oligopeptide is between four and fifty, between six and forty amino acids long, between six and thirty amino acids long, or between eight and twenty-five amino acids long. In some embodiments, the oligopeptide comprises an active amino acid sequence and an N-terminal proline, a C-terminal aspartic acid, or both the N-terminal proline and the C-terminal aspartic acid.

[0348] In some embodiments, the oligopeptide comprises an active amino acid sequence that is 4-50 or 5-30 amino acids long. In some embodiments, the active amino acid sequence is at least four, at least five, at least six, at least seven, at least eight, at least nine, at least ten, at least fifteen, at least twenty, or at least twenty-five amino acids long. In some embodiments, the oligopeptide is up to fifty amino acids in length. In some embodiments, the active amino acid sequence is less than fifty, less than forty-five, less than forty, less than thirty-five, less than thirty, less than twenty-five, or less than twenty amino acids long. In some embodiments, the active amino acid sequence is between four and fifty, between six and forty amino acids long, between six and thirty amino acids long, or between eight and twenty-five amino acids long. In some embodiments, the oligopeptide comprises an active amino acid sequence and a tag comprising additional amino acids. In some embodiments, the tag is a rest of cleavage of a linker. In some embodiments, the tag is located N or C terminal to the active amino acid sequence. In some embodiments the oligopeptide comprises a tag on both the N and C-terminus.

[0349] In some embodiments, the oligopeptide comprises the amino acid sequence of any one of SEQ ID NOs: 12-14 and 31-2401. In some embodiments, one or more oligopeptides comprise an amino acid sequence that has at least 80%, at least 85%, at least 90%, at least 91%, at least 92%, at least 93%, at least 94%, at least 95%, at least 96%, at least 97%, at least 98%, or at least 99% sequence identity with the amino acid sequence set forth in SEQ ID NO: 12. In some embodiments, one or more oligopeptides comprise an amino acid sequence that has between 80% to 85%, 85% to 90%, 90% to 95%, or 95% to 100% sequence identity with the amino acid sequence set forth in SEQ ID NO: 13. In some embodiments, the one or more oligopeptides comprise at least one amino acid sequence that has at least 80%, at least 85%, at least 90%, at least 91%, at least 92%, at least 93%, at least 94%, at least 95%, at least 96%, at least 97%, at least 98%, or at least 99% sequence identity with the amino acid sequence set forth in SEQ ID NO: 14. In some embodiments, the oligopeptide is 4-50 or 5-30 amino acids long. In some embodiments, the oligopeptide comprises an active amino acid sequence and an N-terminal proline, a C-terminal aspartic acid, or both the N-terminal proline and the C-terminal aspartic acid.

[0350] In some embodiments, the oligopeptides provided herein are produced by cleavage of a concatemer of multiple oligopeptides that are linked together and expressed as a single polypeptide chain. In some embodiments, the cleavage is of a homoconcatemer. In some embodiments, the cleavage is of a heteroconcatemer. In some embodiments, cleavage results in a short (one to two) amino acid tag at the N and/or C terminus of the oligopeptide.

[0351] In some embodiments, the oligopeptide comprises an active amino acid sequence and an N-terminus and/or C-terminus residues. The N-terminus and/or C-terminus residues may correspond to a cleavage tag. For instance, the residue may be part of a peptide bond that is cleaved by chemical (e.g. acidic cleavage), or enzymatic reactions. In some embodiments, the oligopeptide comprises an active amino acid sequence and an N-terminal proline, methionine, tryptophan, glycine or cysteine, and/or a C-terminal methionine, aspartic acid, cysteine, asparagine, or tryptophan. In some embodiments, the oligopeptide comprises an active amino acid sequence and an N-terminal proline, a C-terminal aspartic acid, or both the N-terminal proline and the C-terminal aspartic acid. In some embodiments, the oligopeptide is 4-50 or 5-30 amino acids long. In some embodiments, the active amino acid sequence is a miPEP.

### VII. Compositions

[0352] Provided herein are compositions comprising one or more oligopeptides produced by any of the methods of the disclosure. In some embodiments, the one or more oligopeptides comprise an active amino acid sequence. In some embodiments, the one or more oligopeptides are 4-50 or 5-30 amino acids long. In some embodiments, the one or more oligopeptides comprise an N-terminal proline, a C-terminal aspartic acid, or both the N-terminal proline and the C-terminal aspartic acid.

[0353] In some embodiments, the compositions provided herein are produced by cleavage of a concatemeric polypeptide. In some embodiments, the concatemeric polypeptide is a heteroconcatemer. In some embodiments, the concatemeric polypeptide is a homoconcatemer. In some embodiments, the composition comprises a single type of active oligopeptide produced by cleavage of a homoconcatemer. In some embodiments, the composition comprises multiple active oligopeptides produced by cleavage of a heteroconcatemer. Various ratios of peptides in the composition such as 1:1, 1:2, 1:3, 1:4, 1:1:1 are contemplated.

[0354] In some embodiments, the composition is formulated as a liquid, a gel, an emulsion, a suspension, an encapsulation, a solid, a powder, an aerosol, a paste, a coating, a spray, a soil drench, a microcapsule, an emulsifiable concentrate, or as granules. In some embodiments, the composition is formulated as for agricultural use. In some embodiments, the composition is formulated as a seed treatment, a foliar spray, a foliar drench, a Ready-To-Use (RTU) formulation, a produce coating, a suspension concentrate, a tank-mix, an aerosol, a root dip, a soil treatment, a dipping formulation, an irrigation formulation, or a sprinkler formulation. In some embodiments, the composition is formulated to be applied to a plant. In some embodiments, the composition is formulated to be applied to one or more of a seed, root, tuber, fruit, leaf, bulb, rhizome, or flower. In some embodiments, the composition can be applied to a plant by foliar spray, foliar drench, drip irrigation, coating, mixing, pouring, dusting, atomizing, soil irrigation, fumigation, soil injection, seepage irrigation, sprinklers or manual irrigation. In some embodiments, the composition is formulated to be applied to a plant by foliar spray. In some embodiments, the composition formulated for agricultural use comprises one or more oligopeptides. In some embodiments, the one or more oligopeptides are 4-50 or 5-30 amino acids long. In some embodiments, the one or more oligopeptides comprise an N-terminal proline, a C-terminal aspartic acid, or both the N-terminal proline and the C-terminal aspartic acid.

[0355] In some embodiments, the composition is formulated as a pharmaceutically acceptable composition. In some embodiments, the pharmaceutically acceptable composition is formulated as a liquid, an emulsion, a liquefied drop, a spray, a foam preparation, a granule, a fine granule, a powder, a capsule, a pill, a paste, a tablet, chewables, injections, suppositories, creams, shampoos, rinses, resins, smokes, or baits. In some embodiments, the pharmaceutically acceptable composition is formulated for administration to a non-human animal. In some embodiments, the pharmaceutically acceptable composition is formulated for administration to a human. In some embodiments, the pharmaceutically acceptable composition comprises one or more oligopeptides. In some embodiments, the one or more oligopeptides are 4-50 or 5-30 amino acids long. In some embodiments, the one or more oligopeptides comprise an N-terminal proline, a C-terminal aspartic acid, or both the N-terminal proline and the C-terminal aspartic acid.

[0356] In some embodiments, the composition comprises one or more oligopeptides and a carrier. In some embodiments, the carrier is an agriculturally acceptable carrier. In some embodiments, the agriculturally acceptable carrier comprises a solid carrier, a liquid carrier, a gel carrier, a suspension, or an emulsion. In some embodiments, the agriculturally acceptable carrier comprises an adjuvant, an inert component, a dispersant, a surfactant, an emulsifier, a thickener, a wetting agent, a fertilizer, a mineral, a solvent, a tackifier, a binder, or a stabilizer. In some embodiments, the composition comprises one or more oligopeptides and a pharmaceutically acceptable carrier. In some embodiments, the one or more oligopeptides are 4-50 or 5-30 amino acids long. In some embodiments, the one or more oligopeptides comprise an N-terminal proline, a C-terminal aspartic acid, or both the N-terminal proline and the C-terminal aspartic acid. In some embodiments, the composition comprises one or more oligopeptides oligopeptide comprising an active amino acid sequence. In some embodiments, the active amino acid sequence is a micropeptide (miPEPs). In some embodiments, the oligopeptide comprises a miPEP sequence that regulates a miRNA. In some embodiments, the miPEP sequence regulates one or more members of a particular miRNA family. In some embodiments, the miPEP sequence regulates a plant miRNA. Exemplary plant microRNA families that may be regulated by miPEPs include, but are not limited to, plant miRNA families miR156, miR159/319, miR160, miR162, miR164, miR166, miR167, miR168, miR169, miR171, miR172, miR390, miR393, miR394, miR295, miR396, miR397, miR398, miR408, miR403, miR437, miR444, and miR445. In some embodiments, the composition comprises a miPEP that has microbe inhibiting activity. In some embodiments, the composition comprises a miPEP that inhibits a virus, a bacteria, a fungi, an amoeba, or an eukaryote. In some embodiments, the miPEPs comprise an N-terminal proline, a C-terminal aspartic acid, or both the N-terminal proline and the C-terminal aspartic acid. In some embodiments, the one or more oligopeptides are 4-50 or 5-30 amino acids long.

[0357] In some embodiments, the composition comprises one or more oligopeptides comprising the amino acid sequence of any one of SEQ ID NOs: 12-14 and 31-2401. In some embodiments, one or more oligopeptides comprise an amino acid sequence that has at least 80%, at least 85%, at least 90%, at least 91%, at least 92%, at least 93%, at least 94%, at least 95%, at least 96%, at least 97%, at least 98%, or at least 99% sequence identity with the amino acid sequence set forth in SEQ ID NO: 12. In some embodiments, one or more oligopeptides comprise an amino acid sequence that has between 80% to 85%, 85% to 90%, 90% to 95%, or 95% to 100% sequence identity with the amino acid sequence set forth in SEQ ID NO: 13. In some embodiments, the one or more oligopeptides comprise at least one amino acid sequence that has at least 80%, at least 85%, at least 90%, at least 91%, at least 92%, at least 93%, at least 94%, at least 95%, at least 96%, at least 97%, at least 98%, or at least 99% sequence identity with the amino acid sequence set forth in SEQ ID NO: 14. In some embodiments, the composition comprises two or more oligopeptides. In some embodiments, the composition comprises three or more oligopeptides.

[0358] In some embodiments, the composition comprises one or more oligopeptides comprise an active amino acid sequence and an N-terminus and/or C-terminus residues. The N-terminus and/or C-terminus residues may correspond to a cleavage tag. In some embodiments, the oligopeptide comprises an active amino acid sequence and an N-terminal proline, methionine, tryptophan, glycine or cysteine, and/or a C-terminal methionine, aspartic acid, cysteine, asparagine, or tryptophan. In some embodiments, the composition comprises one or more oligopeptides comprising an active amino acid sequence and an N-terminal praline, a C-terminal aspartic acid, or both the N-terminal praline and the C-terminal aspartic acid.

### VII. Nucleic Acids

[0359] Also provided are nucleic acids encoding any of the fusion polypeptides, polypeptides, insoluble carrier polypeptides (e.g., onconase polypeptides or TAF12 polypeptides) or oligopeptides disclosed herein. In some embodiments, the nucleic acid includes sequence elements that enhance the expression of the encoded polypeptide in a cell. For examples, the nucleic acid may comprise an origin of replication that when incorporated into a vector leads to a copy number that is high enough to yield expression of the encoded polypeptide. In some embodiments, the nucleic acid comprises a promoter that regulates the expression of the fusion polypeptide. In some embodiments, the promoter is a bacterial or yeast promoter. In some embodiments, the promoter is a constitutive or an inducible promoter. In some embodiments, the promoter is a strong promoter. In some embodiments, the promoter drives the expression of the encoded polypeptide in inclusion bodies.

[0360] The nucleic acids of the disclosure may be prepared using any technique known in the art. Without limitation, these may include cloning, DNA isolation, amplification and purification, enzymatic reactions involving DNA ligase, DNA polymerase, restriction endonucleases and the like, and various separation techniques, such as gel electrophoresis and chromatography. Several standard techniques are described in Ausubel et al. (1992) Current Protocols in Molecular Biology, Green/Wiley, New York, N.Y.; Sambrook et al. (1989) Molecular Cloning, Second Edition, Cold Spring Harbor Laboratory, Plainview, N.Y.; Maniatis et al. (1982) Molecular Cloning, Cold Spring Harbor Laboratory, Plainview, N.Y.; Wu (ed.) (1993) Meth. Enzymol. 218, Part I; Wu (ed.) (1979) Meth. Enzymol. 68; Wu et al. (eds.) (1983) Meth. Enzymol. 100 and 101; Grossman and Moldave (eds.) Meth. Enzymol. 65; Miller (ed.) (1972) Experiments in Molecular Genetics, Cold Spring Harbor Laboratory, Cold Spring Harbor, N.Y.; Old and Primrose (1981) Principles of Gene Manipulation, University of California Press, Berkeley; Schleif and Wensink (1982) Practical Methods in Molecular Biology; Glover (ed.) (1985) DNA Cloning Vol. I and II, IRL Press, Oxford, UK; Hames and Higgins (eds.) (1985) Nucleic Acid Hybridization, IRL Press, Oxford, UK; Setlow and Hollaender (1979) Genetic Engineering: Principles and Methods, Vols. 1-4, Plenum Press, New York; and Ausubel et al. (1992) Current Protocols in Molecular Biology, Greene/Wiley, New York, N.Y. Abbreviations and nomenclature, where employed, are deemed standard in the field and commonly used in professional journals such as those cited herein.

[0361] Also provided herein are vectors comprising nucleic acids encoding any of the fusion polypeptides, insoluble carrier polypeptides (e.g., onconase polypeptides or TAF12 polypeptides) or oligopeptides disclosed herein.

[0362] A “vector” is a nucleic acid that is capable of transporting another nucleic acid. Vectors may be, for example, plasmids, viruses, cosmids or phage. An “expression vector” is a vector that is capable of directing expression of a protein encoded by one or more genes carried by the vector when it is present in the appropriate environment. Examples of vectors are those that can autonomously replicate and express structural gene products present in the DNA segments to which they are operatively linked. Vectors, therefore, can contain the replicons and selectable markers described earlier. Vectors include, but are not necessarily limited to, expression vectors. In some embodiments, the vector is a bacterial vector. In some embodiments, the vector is a yeast vector. In some embodiments,

[0363] Examples of expression vectors that can be used in prokaryotic host cells include those derived from commercially available plasmids such as the cloning vector pET plasmids (Novagen, Madison, Wis., USA) or pBR322 (ATCC 37017). The pBR322 vector contains genes for ampicillin and tetracycline resistance and thus provides simple means for identifying transformed cells. To construct an expression vector using pBR322, an appropriate promoter and a DNA sequence encoding one or more of the polypeptides of the invention are inserted into the pBR322 vector. Other commercially available vectors include, for example, pKK223-3 (Pharmacia Fine Chemicals, Uppsala, Sweden) and pGEM-1 (Promega Biotec, Madison, Wis., USA). Other commercially available vectors include those that are specifically designed for the expression of proteins; these would include pMAL-p2 and pMAL-c2 vectors that are used for the expression of proteins fused to maltose binding protein (New England Biolabs, Beverly, Mass., USA).

[0364] In yeast, a number of vectors containing constitutive or inducible promoters may be used. For a review, see Current Protocols in Molecular Biology, Vol. 2, Ed. Ausubel et al., Greene Publish. Assoc. & Wiley Interscience, Ch. 13 (1988); Bitter et al., Expression and Secretion Vectors for Yeast, in Methods in Enzymology, Eds. Wu & Grossman, 31987, Acad. Press, N.Y., Vol. 153, pp. 516-544 (1987); Glover, DNA Cloning, Vol. II, IRL Press, Wash., D.C., Ch. 3 (1986); Bitter, Heterologous Gene Expression in Yeast, Methods in Enzymology, Eds. Berger & Kimmel, Acad. Press, N.Y., Vol. 152, pp. 673-684 1987); and The Molecular Biology of the Yeast Saccharomyces, Eds. Strathern et al., Cold Spring Harbor Press, Vols. I and II (1982). A constitutive yeast promoter such as ADH1 or LEU2 or an inducible promoter such as GAL4 may be used (Cloning in Yeast, Ch. 3, R. Rothstein In: DNA Cloning Vol. 11, A Practical Approach, Ed. D M Glover, IRL Press, Wash., D.C. (1986)). Alternatively, vectors may be used which promote integration of foreign DNA sequences into the yeast or bacterial chromosome.

[0365] Promoter sequences commonly used for recombinant prokaryotic host cell expression vectors include the bacteriophage T7 promoter (Studier and Moffatt, J. Mol. Biol. 189:113 (1986)), β-lactamase (penicillinase), lactose promoter system (Chang et al., Nature 275:615, 1978; Goeddel et al., Nature 281:544 (1979)), tryptophan (tap) promoter system (Goeddel et al., Nucl. Acids Res. 8:4057 (1980); EP-A-36776), and tac promoter (Maniatis, Molecular Cloning: A Laboratory Manual, Cold Spring Harbor Laboratory; p. 412 (1982)). A particularly useful prokaryotic host cell expression system employs a phage λ PL promoter and a c1857ts thermolabile repressor sequence. Plasmid vectors available from the American Type Culture Collection (ATCC), which incorporate derivatives of the PL promoter, include plasmid pHUB2 (resident in E. coli strain JMB9 (ATCC 37092)) and pPLc28 (resident in E. coli RR1 (ATCC 53082)).

[0366] In some embodiments, the nucleic acid encodes a fusion polypeptide comprising a protein that forms inclusion bodies in a cell operably linked to one or more oligopeptides by a peptide bond. In some embodiments, the inclusion body tag is an onconase polypeptide. In some embodiments, the protein that forms inclusion bodies in a cell is an onconase. In some embodiments, the onconase is a variant onconase.

[0367] In some embodiments, the nucleic acid encodes a fusion polypeptide comprising an insoluble carrier polypeptide (e.g., an onconase polypeptide or a TAF12 polypeptide) operably linked to one or more polypeptides by a peptide bond. In some embodiments, the nucleic acid encodes a fusion polypeptide comprises two or more, three or more oligopeptides, four or more oligopeptides, five or more oligopeptides, six or more polypeptides, eight or more polypeptides, ten or more polypeptides, fifteen or more polypeptides, or twenty or more oligopeptides operably linked to the insoluble carrier polypeptide (e.g., an onconase polypeptide or a TAF12 polypeptide). In some embodiments, the one or more oligopeptides are operably linked to the N-terminus and/or the C-terminus of the onconase. In some embodiments, the one or more oligopeptides are 4-50 or 5-30 amino acids long. In some embodiments, the fusion polypeptide encoded by the nucleic acid comprises a cleavable Asp-Pro bond.

[0368] In some embodiments, the nucleic acid encodes a fusion polypeptide comprising an insoluble carrier polypeptide (e.g., an onconase polypeptide or a TAF12 polypeptide) operably linked to one or more polypeptides by a peptide bond that is capable of sequence-specific chemical cleavage. In some embodiments, the peptide bond includes (i) a methionine and the sequence-specific chemical cleavage is with cyanogen bromide, (ii) a tryptophan and the sequence-specific chemical cleavage is with BNPS-skatole, (iii) an aspartic acid-proline (Asp-Pro) bond and the sequence-specific chemical cleavage is with formic acid, (iv) an asparagine-glycine bond and the sequence-specific chemical cleavage is with hydroxylamine, or (v) a cysteine and the sequence-specific chemical cleavage is with NTCB. In some embodiments, the one or more oligopeptides are operably linked to the insoluble carrier polypeptide (e.g., an onconase polypeptide or a TAF12 polypeptide) by a peptide bond comprising an Asp-Pro bond and the sequence-specific chemical cleavage is with formic acid or acetic acid.

[0369] In some embodiments, the nucleic acid encodes a fusion polypeptide comprising one or more oligopeptides that are less than 25 amino acids in length. In some embodiments, the one or more oligopeptides are at least four, at least five, at least six, at least seven, at least eight, at least nine, at least ten, at least fifteen, at least twenty, or at least twenty-five amino acids long. In some embodiments, the one or more oligopeptides are up to fifty amino acids in length. In some embodiments, the one or more oligopeptides are less than fifty, less than forty-five, less than forty, less than thirty-five, less than thirty, less than twenty-five, or less than twenty amino acids long. In some embodiments, the one or more oligopeptides are between four and fifty, between six and forty amino acids long, between six and thirty amino acids long, or between eight and twenty-five amino acids long.

[0370] In some embodiments, the nucleic acid encodes a fusion polypeptide comprising an onconase operably linked to one or more oligopeptides having the amino acid sequence of any one of SEQ ID NOs: 12-14 and 31-2401. In some embodiments, the one or more oligopeptides comprise an amino acid sequence that has at least 80%, at least 85%, at least 90%, at least 91%, at least 92%, at least 93%, at least 94%, at least 95%, at least 96%, at least 97%, at least 98%, or at least 99% sequence identity with any one of SEQ ID NOs: 12-14 and 31-2401. In some embodiments, the one or more oligopeptides comprise an amino acid sequence that has between 80% to 85%, 85% to 90%, 90% to 95%, or 95% to 100% sequence identity with any one of SEQ ID NOs: 12-14 and 31-2401. In some embodiments, the one or more oligopeptides comprise at least one of the amino acid sequence of any one of SEQ ID NOs: 12-14 and 31-2401. In some embodiments, the one or more oligopeptides comprise at least one amino acid sequence that has at least 80%, at least 85%, at least 90%, at least 91%, at least 92%, at least 93%, at least 94%, at least 95%, at least 96%, at least 97%, at least 98%, or at least 99% sequence identity with any one of SEQ ID NOs: 12-14 and 31-2401. In some embodiments, the one or more oligopeptides comprise at least one amino acid sequence that has between 80% to 85%, 85% to 90%, 90% to 95%, or 95% to 100% sequence identity with any one of SEQ ID NOs: 12-14 and 31-2401. In some embodiments, the onconase is a variant onconase. In some embodiments, the one or more oligopeptides comprise an active amino acid sequence and an N-terminal proline, a C-terminal aspartic acid, or both the N-terminal proline and the C-terminal aspartic acid when released from the fusion polypeptide. In some embodiments, the nucleic acid further comprises a linker sequence between the one or more oligopeptides and/or between the insoluble carrier polypeptide (e.g., an onconase polypeptide or a TAF12 polypeptide) and the oligopeptides. In some embodiments, the linker sequence is capable of being cleaved by sequence-specific chemical cleavage.

[0371] In some embodiments, the nucleic acid encodes a fusion polypeptide comprising an insoluble carrier polypeptide (e.g., an onconase polypeptide or a TAF12 polypeptide) operably linked to one or more micropeptides (miPEPs). In some embodiments, the one or more oligopeptides comprise a miPEP sequence that regulates a miRNA. In some embodiments, the one or more oligopeptides comprise a miPEP sequence that regulates one or more miRNA families. In some embodiments, the one or more oligopeptides comprise a miPEP sequence that regulates a plant miRNA. In some embodiments, the one or more oligopeptides comprise a miPEP sequence that has microbe inhibiting activity.

[0372] In some embodiments, the nucleic acid encodes a fusion polypeptide comprising an onconase polypeptide comprising the amino acid sequence of SEQ ID NO: 1 operably linked to one or more oligopeptides by a peptide bond. In some embodiments, the onconase polypeptide comprises an amino acid sequence that has at least 80%, at least 85%, at least 90%, at least 91%, at least 92%, at least 93%, at least 94%, at least 95%, at least 96%, at least 97%, at least 98%, or at least 99% sequence identity to SEQ ID NO: 1. In some embodiments, the onconase polypeptide comprises an amino acid sequence that has between 80% to 85%, 85% to 90%, 90% to 95%, or 95% to 100% sequence identity with any one of SEQ ID NO: 1. In some embodiments, the onconase polypeptide comprises one or more amino acid substitutions as compared to the amino acid sequence of SEQ ID NO: 1. In some embodiments, the onconase polypeptide comprises one or more insertions or deletions as compared to the amino acid sequence of SEQ ID NO: 1.

[0373] In some embodiments, the nucleic acid encodes a fusion polypeptide comprising an onconase polypeptide with one or more amino acid substitutions that decrease susceptibility to chemical cleavage as compared to an onconase polypeptide having the amino acid sequence of SEQ ID NO: 1. In some embodiments, the nucleic acid encodes a fusion polypeptide comprising an onconase polypeptide with one or more deletions or insertions that reduce susceptibility to chemical cleavage as compared to an onconase polypeptide having the amino acid sequence of SEQ ID NO: 1.

[0374] In some embodiments, the nucleic acid encodes a fusion polypeptide comprising an onconase polypeptide with one or more amino acid substitutions, or one or more deletions and insertions that increase yield or promote formation of inclusion bodies as compared to an onconase polypeptide having the amino acid sequence of SEQ ID NO: 1. In some embodiments, the nucleic acid encodes a fusion polypeptide comprising an onconase polypeptide comprising the amino acid sequence of any one of SEQ ID NOs: 2-10, optionally with one, two, three, four, five or all six C-terminal histidine residues deleted as shown in FIG. 20A. In some embodiments, the nucleic acid encodes a fusion polypeptide comprising an onconase polypeptide comprising an amino acid sequence that has at least 80%, at least 85%, at least 90%, at least 91%, at least 92%, at least 93%, at least 94%, at least 95%, at least 96%, at least 97%, at least 98%, or at least 99% sequence identity to any of SEQ ID NOs: 2-10 and 15-22, optionally with one, two, three, four, five or all six C-terminal histidine residues deleted as shown in FIG. 20A. In some embodiments, the onconase polypeptide comprises an amino acid sequence that has between 80% to 85%, 85% to 90%, 90% to 95%, or 95% to 100% sequence identity with any one of SEQ ID NOs: 2-10 and 15-22, optionally with one, two, three, four, five or all six C-terminal histidine residues deleted as shown in FIG. 20A.

[0375] In some embodiments, the nucleic acid encodes a fusion polypeptide comprising an onconase polypeptide with a modified N-terminus and/or C-terminus operably linked to one or more oligopeptides. In some embodiments, the onconase polypeptide comprises one or more amino acid substitution in the N-terminus and/or C-terminus as compared to SEQ ID NO: 1. In some embodiments, the nucleic acid encodes a fusion polypeptide comprising an onconase polypeptide comprising 11 amino acid substitutions in the N-terminus and/or C-terminus as compared to SEQ ID NO: 1. In some embodiments, the nucleic acid encodes a fusion polypeptide comprising an onconase polypeptide 11 amino acid substitutions in the N-terminus as compared to SEQ ID NO: 1. In some embodiments, the nucleic acid further comprises a linker sequence between the one or more oligopeptides and/or between the onconase polypeptide and the oligopeptides. In some embodiments, the linker sequence is capable of being cleaved by sequence-specific chemical cleavage.

[0376] In some embodiments, the nucleic acid encodes a fusion polypeptide comprising a TAF12 polypeptide comprising the amino acid sequence of SEQ ID NO: 23 operably linked to one or more oligopeptides by a peptide bond. In some embodiments, the TAF12 polypeptide comprises an amino acid sequence that has at least 80%, at least 85%, at least 90%, at least 91%, at least 92%, at least 93%, at least 94%, at least 95%, at least 96%, at least 97%, at least 98%, or at least 99% sequence identity to SEQ ID NO: 1. In some embodiments, the TAF12 polypeptide comprises an amino acid sequence that has between 80% to 85%, 85% to 90%, 90% to 95%, or 95% to 100% sequence identity with any one of SEQ ID NO: 23. In some embodiments, the TAF12 polypeptide comprises one or more amino acid substitutions as compared to the amino acid sequence of SEQ ID NO: 23. In some embodiments, the TAF12 polypeptide comprises one or more insertions or deletions as compared to the amino acid sequence of SEQ ID NO: 23.

[0377] In some embodiments, the nucleic acid encodes a fusion polypeptide comprising a TAF12 polypeptide with one or more amino acid substitutions that decrease susceptibility to chemical cleavage as compared to a TAF12 polypeptide having the amino acid sequence of SEQ ID NO: 23. In some embodiments, the nucleic acid encodes a fusion polypeptide comprising a TAF12 polypeptide with one or more deletions or insertions that reduce susceptibility to chemical cleavage as compared to a TAF12 polypeptide having the amino acid sequence of SEQ ID NO: 23.

[0378] In some embodiments, the nucleic acid encodes a fusion polypeptide comprising a TAF12 polypeptide with one or more amino acid substitutions, or one or more deletions and insertions that increase yield or promote formation of inclusion bodies as compared to a TAF12 polypeptide having the amino acid sequence of SEQ ID NO: 23.

[0379] In some embodiments, the nucleic acid encodes a fusion polypeptide comprising a TAF12 polypeptide with a modified N-terminus and/or C-terminus operably linked to one or more oligopeptides. In some embodiments, the TAF12 polypeptide comprises one or more amino acid substitution in the N-terminus and/or C-terminus as compared to SEQ ID NO: 23. In some embodiments, the nucleic acid encodes a fusion polypeptide comprising a TAF12 polypeptide comprising 11 amino acid substitutions in the N-terminus and/or C-terminus as compared to SEQ ID NO: 23. In some embodiments, the nucleic acid encodes a fusion polypeptide comprising a TAF12 polypeptide 11 amino acid substitutions in the N-terminus as compared to SEQ ID NO: 23. In some embodiments, the nucleic acid further comprises a linker sequence between the one or more oligopeptides and/or between the TAF12 polypeptide and the oligopeptides. In some embodiments, the linker sequence is capable of being cleaved by sequence-specific chemical cleavage.

[0380] In some embodiments, the nucleic acid encodes an oligopeptide. In some embodiments, the nucleic acid encodes an oligopeptide comprising an active amino acid sequence. In some embodiments, the active amino acid sequence is a micropeptide (miPEPs). In some embodiments, the nucleic acid encodes an oligopeptide comprising a miPEP sequence that regulates a miRNA. In some embodiments, the miPEP sequence regulates one or more members of a particular miRNA family. In some embodiments, the miPEP sequence regulates a plant miRNA. In some embodiments, the miPEP sequence regulates a plant miRNA family selected from the group consisting on miR156, miR159/319, miR160, miR162, miR164, miR166, miR167, miR168, miR169, miR171, miR172, miR390, miR393, miR394, miR295, miR396, miR397, miR398, miR408, miR403, miR437, miR444, and miR445. In some embodiments, the miPEPs comprise an N-terminal proline, a C-terminal aspartic acid, or both the N-terminal proline and the C-terminal aspartic acid.

[0381] In some embodiments, the nucleic acid encodes a miPEP that has microbe inhibiting activity.

[0382] In some embodiments, the nucleic acid encodes an oligopeptide comprising the amino acid sequence of any one of SEQ ID NOs: 12-14 and 31-2401. In some embodiments, the nucleic acid encodes an oligopeptide comprising an amino acid sequence that has at least 80%, at least 85%, at least 90%, at least 91%, at least 92%, at least 93%, at least 94%, at least 95%, at least 96%, at least 97%, at least 98%, or at least 99% sequence identity with any one of SEQ ID NOs: 12-14 and 31-2401. In some embodiments, the nucleic acid encodes an oligopeptide comprising an amino acid sequence that has between 80% to 85%, 85% to 90%, 90% to 95%, or 95% to 100% sequence identity with any one of SEQ ID NOs: 12-14 and 31-2401. In some embodiments, the nucleic acid encodes an oligopeptide comprising at least one of the amino acid sequence of any one of SEQ ID NOs: 12-14 and 31-2401. In some embodiments, the nucleic acid encodes an oligopeptide comprising at least one amino acid sequence that has at least 80%, at least 85%, at least 90%, at least 91%, at least 92%, at least 93%, at least 94%, at least 95%, at least 96%, at least 97%, at least 98%, or at least 99% sequence identity with any one of SEQ ID NOs: 12-14 and 31-2401. In some embodiments, the nucleic acid encodes an oligopeptide comprising at least one amino acid sequence that has between 80% to 85%, 85% to 90%, 90% to 95%, or 95% to 100% sequence identity with any one of SEQ ID NOs: 12-14 and 31-2401. In some embodiments, the oligopeptide is 4-50 or 5-30 amino acids long. In some embodiments, the oligopeptide comprises an N-terminal proline, a C-terminal aspartic acid, or both the N-terminal proline and the C-terminal aspartic acid.

[0383] In some embodiments, the nucleic acid encodes an onconase polypeptide. In some embodiments, the onconase is a variant onconase. In some embodiments, the nucleic acid encodes an onconase polypeptide comprising the amino acid sequence of SEQ ID NO: 1. In some embodiments, the nucleic acid encodes an onconase polypeptide comprising an amino acid sequence that has at least 80%, at least 85%, at least 90%, at least 91%, at least 92%, at least 93%, at least 94%, at least 95%, at least 96%, at least 97%, at least 98%, or at least 99% sequence identity to SEQ ID NO: 1. In some embodiments, the nucleic acid encodes an onconase polypeptide comprising an amino acid sequence that has between 80% to 85%, 85% to 90%, 90% to 95%, or 95% to 100% sequence identity to SEQ ID NO: 1. In some embodiments, the nucleic acid encodes an onconase polypeptide comprising one or more amino acid substitutions compared to the amino acid sequence of SEQ ID NO: 1. In some embodiments, the nucleic acid encodes an onconase polypeptide comprising one or more insertions or deletions as compared to the amino acid sequence of SEQ ID NO: 1. In some embodiments, the one or more amino acid substitutions, or one or more deletions or insertions decrease susceptibility of the onconase polypeptide to chemical cleavage as compared to an onconase polypeptide having the amino acid sequence of SEQ ID NO: 1. In some embodiments, the one or more amino acid substitutions, or one or more insertions or deletions result in a variant onconase that has increased yield or increase capacity to form inclusion bodies in a cell than an onconase polypeptide having the amino acid sequence of SEQ ID NO: 1. In some embodiments, the nucleic acid encodes an onconase polypeptide comprising the amino acid sequence of any one of SEQ ID NOs: 2-10 and 15-22, optionally with one, two, three, four, five or all six C-terminal histidine residues deleted as shown in FIG. 20A. In some embodiments, the nucleic acid encodes an onconase polypeptide comprising an amino acid sequence that has at least 80%, at least 85%, at least 90%, at least 91%, at least 92%, at least 93%, at least 94%, at least 95%, at least 96%, at least 97%, at least 98%, or at least 99% sequence identity to any of SEQ ID NOs: 2-10 and 15-22, optionally with one, two, three, four, five or all six C-terminal histidine residues deleted as shown in FIG. 20A. In some embodiments, the nucleic acid encodes an onconase polypeptide having at least one amino acid sequence that has between 80% to 85%, 85% to 90%, 90% to 95%, or 95% to 100% sequence identity with any one of SEQ ID NOs: 12-14 and 31-2401.

[0384] In some embodiments, the nucleic acid encodes an onconase polypeptide comprising a modified N-terminus and/or C-terminus. In some embodiments, the nucleic acid encodes an onconase polypeptide comprising one or more amino acid substitution in the N-terminus and/or C-terminus as compared to SEQ ID NO: 1. In some embodiments, the nucleic acid encodes an onconase polypeptide comprising 11 amino acid substitutions in the N-terminus and/or C-terminus as compared to SEQ ID NO: 1. In some embodiments, the nucleic acid encodes an onconase polypeptide comprising 11 amino acid substitutions in the N-terminus as compared to SEQ ID NO: 1.

[0385] In some embodiments, the nucleic acid encodes a TAF12 polypeptide. In some embodiments, the TAF12 is a variant TAF12. In some embodiments, the nucleic acid encodes a TAF12 polypeptide comprising the amino acid sequence of SEQ ID NO: 23. In some embodiments, the nucleic acid encodes a TAF12 polypeptide comprising an amino acid sequence that has at least 80%, at least 85%, at least 90%, at least 91%, at least 92%, at least 93%, at least 94%, at least 95%, at least 96%, at least 97%, at least 98%, or at least 99% sequence identity to SEQ ID NO: 23. In some embodiments, the nucleic acid encodes a TAF12 polypeptide comprising an amino acid sequence that has between 80% to 85%, 85% to 90%, 90% to 95%, or 95% to 100% sequence identity to SEQ ID NO: 23. In some embodiments, the nucleic acid encodes a TAF12 polypeptide comprising one or more amino acid substitutions compared to the amino acid sequence of SEQ ID NO: 23. In some embodiments, the nucleic acid encodes a TAF12 polypeptide comprising one or more insertions or deletions as compared to the amino acid sequence of SEQ ID NO: 23. In some embodiments, the one or more amino acid substitutions, or one or more deletions or insertions decrease susceptibility of the TAF12 polypeptide to chemical cleavage as compared to a TAF12 polypeptide having the amino acid sequence of SEQ ID NO: 23. In some embodiments, the one or more amino acid substitutions, or one or more insertions or deletions result in a variant TAF12s that has increased yield or increase capacity to form inclusion bodies in a cell than a TAF12 polypeptide having the amino acid sequence of SEQ ID NO: 23. In some embodiments, the nucleic acid encodes a TAF12 polypeptide having at least one amino acid sequence that has between 80% to 85%, 85% to 90%, 90% to 95%, or 95% to 100% sequence identity with any one of SEQ ID NOs: 12-14 and 31-2401.

[0386] In some embodiments, the nucleic acid encodes a TAF12 polypeptide comprising a modified N-terminus and/or C-terminus. In some embodiments, the nucleic acid encodes a TAF12 polypeptide comprising one or more amino acid substitution in the N-terminus and/or C-terminus as compared to SEQ ID NO: 23. In some embodiments, the nucleic acid encodes a TAF12 polypeptide comprising 11 amino acid substitutions in the N-terminus and/or C-terminus as compared to SEQ ID NO: 23. In some embodiments, the nucleic acid encodes a TAF12 polypeptide comprising 11 amino acid substitutions in the N-terminus as compared to SEQ ID NO: 23.

[0387] In some embodiments, the nucleic acid encodes an insoluble carrier polypeptide (e.g., an onconase polypeptide or a TAF12 polypeptide) comprising an amino acid sequence tag. In some embodiments, the amino acid sequence tag is a purification amino acid sequence tag. In some embodiments, the amino acid sequence tag is a detection amino acid sequence tag. In some embodiments, the onconase is a variant onconase.

### IX. Cells

[0388] Also provided are cells expressing any of the fusion polypeptides, oligopeptides, tagged miPEPs or insoluble carrier polypeptides (e.g., onconase polypeptides or TAF12 polypeptides) described herein. In some embodiment, the cell is a bacterial or yeast cell. In some embodiments, the cell is a host cell.

[0389] In some embodiments, the cell is a bacteria cell, a yeast cell, a plant cell, or a metazoan cell. In some embodiments, the cell is a bacterial cell. In some embodiments, the bacteria is an E. coli strain. In some embodiments, the cell is a cell that is capable of forming inclusion bodies. In some embodiments, the cell is a prokaryotic cell. In some embodiments, the cell is a eukaryotic cell. In some embodiments, the cell is a fungal cell. In some embodiments, the cell is an algal cell.

[0390] Microorganism host cells useful in the present invention may include, but are not limited to, bacteria, such as the enteric bacteria (Escherichia and Salmonella for example) as well as Bacillus, Acinetobacter, Streptomyces, Methylobacter, Rhodococcus and Pseudomonas; Cyanobacteria, such as Rhodobacter and Synechocystis; yeasts, such as Saccharomyces, Zygosaccharomyces, Kluyveromyces, Candida, Hansenula, Debaryomyces, Mucor, Pichia, Yarrowia, and Torulopsis; and filamentous fungi such as Aspergillus and Arthrobotrys, and algae for example.

[0391] In some embodiments, the cell comprises one or more modifications to increase expression of the fusion protein. In some embodiments, the cell comprises mutations or deletions of one or more proteases. In some embodiments, the cell comprises a mutation or deletion in an OmpT or Lon gene.

[0392] In some embodiments, the host cell comprises at least one copy of a nucleic acid sequence encoding a fusion polypeptide. The at least one copy of the nucleic acid sequence encoding a fusion polypeptide enzyme can be present in the chromosome of a prokaryotic (bacterial) cell or in one chromosome of a eukaryotic cell. Alternatively, the at least one copy of the nucleic acid sequence encoding a fusion polypeptide can be present in a vector or plasmid that is present in the cell. The host cell, as described above, can be a prokaryotic or eukaryotic cell. If it is a prokaryotic cell, it can be a bacterial cell. If it is a eukaryotic cell, it can be a yeast cell, a plant cell, or an animal cell. Suitable host cells are described herein.

[0393] In some embodiments, the cell expresses a fusion polypeptide comprising an insoluble carrier polypeptide, which forms inclusion bodies operably linked to one or more oligopeptides. In some embodiments, the insoluble carrier polypeptide, which forms inclusion bodies is an insoluble carrier polypeptide (e.g., an onconase polypeptide or a TAF12 polypeptide). In some embodiments, the insoluble carrier polypeptide (e.g., an onconase polypeptide or a TAF12 polypeptide) is a variant insoluble carrier polypeptide (e.g., a variant onconase polypeptide or a variant TAF12 polypeptide). In some embodiments, the one or more oligopeptides are 4-50 or 5-30 amino acids in length. In some embodiments, the one or more oligopeptides are operably linked to the N-terminus and/or the C-terminus of the insoluble carrier polypeptide (e.g., the onconase polypeptide or the TAF12 polypeptide). In some embodiments, the operable linkage comprises an Asp-Pro bond.

[0394] In some embodiments, the cell expresses a fusion polypeptide comprising an insoluble carrier polypeptide (e.g., an onconase polypeptide or a TAF12 polypeptide) operably linked to one or more oligopeptides comprise the amino acid sequence of any one of SEQ ID NOs: 12-14 and 31-2401. In some embodiments, the one or more oligopeptides comprise an amino acid sequence that has at least 80%, at least 85%, at least 90%, at least 91%, at least 92%, at least 93%, at least 94%, at least 95%, at least 96%, at least 97%, at least 98%, or at least 99% sequence identity with any one of SEQ ID NOs: 12-14 and 31-2401. In some embodiments, the one or more oligopeptides comprise an amino acid sequence that has between 80% to 85%, 85% to 90%, 90% to 95%, or 95% to 100% sequence identity with any one of SEQ ID NOs: 12-14 and 31-2401. In some embodiments, the one or more oligopeptides comprise at least one of the amino acid sequence of any one of SEQ ID NOs: 12-14 and 31-2401. In some embodiments, the one or more oligopeptides comprise at least one amino acid sequence that has at least 80%, at least 85%, at least 90%, at least 91%, at least 92%, at least 93%, at least 94%, at least 95%, at least 96%, at least 97%, at least 98%, or at least 99% sequence identity with any one of SEQ ID NOs: 12-14 and 31-2401. In some embodiments, the one or more oligopeptides comprise at least one amino acid sequence that has between 80% to 85%, 85% to 90%, 90% to 95%, or 95% to 100% sequence identity with any one of SEQ ID NOs: 12-14 and 31-2401. In some embodiments, the one or more oligopeptides comprise an active amino acid sequence and an N-terminal proline, a C-terminal aspartic acid, or both the N-terminal proline and the C-terminal aspartic acid when released from the fusion polypeptide. In some embodiments, the insoluble carrier polypeptide (e.g., the onconase polypeptide or the TAF12 polypeptide) is a variant insoluble carrier polypeptide (e.g., a variant onconase polypeptide or a variant TAF12 polypeptide). In some embodiments, the operable linkage comprises an Asp-Pro bond.

[0395] In some embodiments, the cell expresses a fusion polypeptide comprising an insoluble carrier polypeptide (e.g., an onconase polypeptide or a TAF12 polypeptide) operably linked to one or more micropeptides (miPEPs). In some embodiments, the one or more oligopeptides comprise a miPEP sequence that regulates an miRNA. In some embodiments, the one or more oligopeptides comprise a miPEP sequence that regulates one or more members of an miRNA family. In some embodiments, the one or more oligopeptides comprise a miPEP sequence that regulates a plant miRNA. In some embodiments, the one or more oligopeptides comprise a miPEP sequence that regulates a plant miRNA selected from the group consisting of the miR156, miR159/319, miR160, miR162, miR164, miR166, miR167, miR168, miR169, miR171, miR172, miR390, miR393, miR394, miR295, miR396, miR397, miR398, miR408, miR403, miR437, miR444, and miR445 families. In some embodiments, the one or more oligopeptides comprise a miPEP sequence that has microbe inhibiting activity. In some embodiments, the insoluble carrier polypeptide (e.g., the onconase polypeptide or the TAF12 polypeptide) is a variant insoluble carrier polypeptide (e.g., a variant onconase polypeptide or a variant TAF12 polypeptide). In some embodiments, the operable linkage comprises an Asp-Pro bond.

[0396] In some embodiments, the cell expresses a fusion polypeptide further comprising a linker sequence between the one or more oligopeptides and/or between the insoluble carrier polypeptide (e.g., an onconase polypeptide or a TAF12 polypeptide) and the oligopeptides. In some embodiments, the linker sequence separates the one or more oligopeptides and/or a linker sequence separating the insoluble carrier polypeptide (e.g., an onconase polypeptide or a TAF12 polypeptide) from the one or more oligopeptides. In some embodiments, the linker sequence separating the one or more oligopeptides has the same or different sequence than the linker sequence separating the insoluble carrier polypeptide (e.g., an onconase polypeptide or a TAF12 polypeptide) from the one or more oligopeptides. In some embodiments, the cell expresses a fusion polypeptide further comprising one or more amino acid sequence tag.

[0397] In some embodiments, the cell expresses a fusion polypeptide comprising an insoluble carrier polypeptide comprising an onconase polypeptide. In some embodiments, the onconase polypeptide comprises the amino acid sequence of SEQ ID NO: 1 operably linked to one or more oligopeptides by a peptide bond. In some embodiments, the onconase polypeptide comprises an amino acid sequence that has at least 80%, at least 85%, at least 90%, at least 91%, at least 92%, at least 93%, at least 94%, at least 95%, at least 96%, at least 97%, at least 98%, or at least 99% sequence identity to SEQ ID NO: 1. In some embodiments, the onconase polypeptide comprises an amino acid sequence that has between 80% to 85%, 85% to 90%, 90% to 95%, or 95% to 100% sequence identity to SEQ ID NO: 1. In some embodiments, the onconase polypeptide comprises one or more amino acid substitutions, or one or more insertions or deletions, as compared to the amino acid sequence of SEQ ID NO: 1. In some embodiments, the one or more amino acid substitutions, or one or more insertions or deletions, decrease susceptibility of the onconase to chemical cleavage as compared to an onconase polypeptide having the amino acid sequence of SEQ ID NO: 1. In some embodiments, the one or more amino acid substitutions, or one or more insertion or deletions results in an onconase polypeptide that has increase yield or higher capacity to form inclusion bodies in a cell as compared to an onconase polypeptide having the amino acid sequence of SEQ ID NO: 1.

[0398] In some embodiments, the onconase polypeptide comprises the amino acid sequence of any one of SEQ ID NOs: 2-10 and 15-22 operably linked to one or more oligopeptides, optionally with one, two, three, four, five or all six C-terminal histidine residues deleted as shown in FIG. 20A. In some embodiments, the cell expresses a fusion polypeptide comprising an onconase polypeptide comprising an amino acid sequence that has at least 80%, at least 85%, at least 90%, at least 91%, at least 92%, at least 93%, at least 94%, at least 95%, at least 96%, at least 97%, at least 98%, or at least 99% sequence identity to any of SEQ ID NOs: 2-10 and 15-22, optionally with one, two, three, four, five or all six C-terminal histidine residues deleted as shown in FIG. 20A. In some embodiments, the onconase polypeptide comprises at least one amino acid sequence that has between 80% to 85%, 85% to 90%, 90% to 95%, or 95% to 100% sequence identity with any one of SEQ ID NOs: 1-10 and 15-22, optionally with one, two, three, four, five or all six C-terminal histidine residues deleted as shown in FIG. 20A. In some embodiments, the one or more oligopeptides are 4-50 or 5-30 amino acids long. In some embodiments, the operable linkage comprises an Asp-Pro bond.

[0399] In some embodiments, the onconase polypeptide with a modified N-terminus and/or C-terminus operably linked to one or more oligopeptides. In some embodiments, the cell expresses a fusion polypeptide comprising an onconase polypeptide one or more amino acid substitution in the N-terminus and/or C-terminus as compared to SEQ ID NO: 1. In some embodiments, the cell expresses a fusion polypeptide comprising an onconase polypeptide comprising 11 amino acid substitutions in the N-terminus and/or C-terminus as compared to SEQ ID NO: 1. In some embodiments, the cell expresses a fusion polypeptide comprising an onconase polypeptide 11 amino acid substitutions in the N-terminus as compared to SEQ ID NO: 1. In some embodiments, the one or more oligopeptides are 4-50 or 5-30 amino acids long. In some embodiments, the operable linkage comprises an Asp-Pro bond.

[0400] In some embodiments, the cell expresses a fusion polypeptide comprising an insoluble carrier polypeptide comprising a TAF12 polypeptide. In some embodiments, the TAF12 polypeptide comprises the amino acid sequence of SEQ ID NO: 23 operably linked to one or more oligopeptides by a peptide bond. In some embodiments, the TAF12 polypeptide comprises an amino acid sequence that has at least 80%, at least 85%, at least 90%, at least 91%, at least 92%, at least 93%, at least 94%, at least 95%, at least 96%, at least 97%, at least 98%, or at least 99% sequence identity to SEQ ID NO: 23. In some embodiments, the TAF12 polypeptide comprises an amino acid sequence that has between 80% to 85%, 85% to 90%, 90% to 95%, or 95% to 100% sequence identity to SEQ ID NO: 23. In some embodiments, the TAF12 polypeptide comprises one or more amino acid substitutions, or one or more insertions or deletions, as compared to the amino acid sequence of SEQ ID NO: 23. In some embodiments, the one or more amino acid substitutions, or one or more insertions or deletions, decrease susceptibility of the TAF12 to chemical cleavage as compared to a TAF12 polypeptide having the amino acid sequence of SEQ ID NO: 23. In some embodiments, the one or more amino acid substitutions, or one or more insertion or deletions results in a TAF12 polypeptide that has increase yield or higher capacity to form inclusion bodies in a cell as compared to a TAF12 polypeptide having the amino acid sequence of SEQ ID NO: 23. In some embodiments, the one or more oligopeptides are 4-50 or 5-30 amino acids long. In some embodiments, the operable linkage comprises an Asp-Pro bond.

[0401] In some embodiments, the TAF12 polypeptide with a modified N-terminus and/or C-terminus operably linked to one or more oligopeptides. In some embodiments, the cell expresses a fusion polypeptide comprising a TAF12 polypeptide one or more amino acid substitution in the N-terminus and/or C-terminus as compared to SEQ ID NO: 23. In some embodiments, the cell expresses a fusion polypeptide comprising a TAF12 polypeptide comprising 11 amino acid substitutions in the N-terminus and/or C-terminus as compared to SEQ ID NO: 23. In some embodiments, the cell expresses a fusion polypeptide comprising a TAF12 polypeptide 11 amino acid substitutions in the N-terminus as compared to SEQ ID NO: 23. In some embodiments, the one or more oligopeptides are 4-50 or 5-30 amino acids long. In some embodiments, the operable linkage comprises an Asp-Pro bond.

[0402] In some embodiments, the cell expresses an oligopeptide. In some embodiments, the oligopeptide is 4-50 or 5-30 amino acids long. In some embodiments, the cell expresses an oligopeptide comprising an active amino acid sequence. In some embodiments, the active amino acid sequence is a miPEP sequence. In some embodiments, the miPEP sequence regulates a miRNA. In some embodiments, the miPEP sequence regulates a plant miRNA. In some embodiments, the miPEP comprises an N-terminal proline, a C-terminal aspartic acid, or both the N-terminal proline and the C-terminal aspartic acid.

[0403] In some embodiments, the cell expresses an oligopeptide comprising the amino acid sequence of any one of SEQ ID NOs: 12-14 and 31-2401. In some embodiments, the oligopeptide comprises an amino acid sequence that has at least 80%, at least 85%, at least 90%, at least 91%, at least 92%, at least 93%, at least 94%, at least 95%, at least 96%, at least 97%, at least 98%, or at least 99% sequence identity with any one of SEQ ID NOs: 12-14 and 31-2401. In some embodiments, the oligopeptide comprises an amino acid sequence that has between 80% to 85%, 85% to 90%, 90% to 95%, or 95% to 100% sequence identity with any one of SEQ ID NOs: 12-14 and 31-2401. In some embodiments, the cell expresses an oligopeptide comprising at least one of the amino acid sequence of any one of SEQ ID NOs: 12-14 and 31-2401.

[0404] In some embodiments, the oligopeptide is 4-50 or 5-30 amino acids long. In some embodiments, oligopeptide comprises an active amino acid sequence and an N-terminal proline, a C-terminal aspartic acid, or both the N-terminal proline and the C-terminal aspartic acid.

[0405] In some embodiments, the cell expresses an onconase polypeptide. In some embodiments, the onconase polypeptide is a variant onconase polypeptide. In some embodiments, the onconase polypeptide comprises the amino acid sequence of SEQ ID NO: 1. In some embodiments, the onconase polypeptide comprises an amino acid sequence that has at least 80%, at least 85%, at least 90%, at least 91%, at least 92%, at least 93%, at least 94%, at least 95%, at least 96%, at least 97%, at least 98%, or at least 99% sequence identity to SEQ ID NO: 1. In some embodiments, the onconase polypeptide comprises an amino acid sequence that has between 80% to 85%, 85% to 90%, 90% to 95%, or 95% to 100% sequence identity to SEQ ID NO: 1. In some embodiments, the cell expresses an onconase polypeptide comprising one or more amino acid substitutions compared to the amino acid sequence of SEQ ID NO: 1. In some embodiments, the onconase polypeptide comprises one or more insertions or deletions as compared to the amino acid sequence of SEQ ID NO: 1. In some embodiments, the cell expresses an onconase polypeptide comprising one or more amino acid substitutions that decrease susceptibility to chemical cleavage as compared to an onconase polypeptide having the amino acid sequence of SEQ ID NO: 1. In some embodiments, the cell expresses an onconase polypeptide comprising one or more deletions or insertions that reduce susceptibility to chemical cleavage as compared to an onconase polypeptide having the amino acid sequence of SEQ ID NO: 1.

[0406] In some embodiments, the cell expresses an onconase polypeptide comprising one or more amino acid substitutions, or one or more insertions or deletions that increase yield or promote formation of inclusion bodies as compared to an onconase polypeptide having the amino acid sequence of SEQ ID NO: 11.

[0407] In some embodiments, the cell expresses an onconase polypeptide comprising the amino acid sequence of any one of SEQ ID NOs: 2-10 and 15-22, optionally with one, two, three, four, five or all six C-terminal histidine residues deleted as shown in FIG. 20A. In some embodiments, the onconase polypeptide comprises an amino acid sequence that has at least 80%, at least 85%, at least 90%, at least 91%, at least 92%, at least 93%, at least 94%, at least 95%, at least 96%, at least 97%, at least 98%, or at least 99% sequence identity to any of SEQ ID NOs: 2-10 and 15-22, optionally with one, two, three, four, five or all six C-terminal histidine residues deleted as shown in FIG. 20A. In some embodiments, the onconase polypeptide comprises at least one amino acid sequence that has between 80% to 85%, 85% to 90%, 90% to 95%, or 95% to 100% sequence identity with any one of SEQ ID NOs: 12-14 and 31-2401. In some embodiments, the onconase polypeptide comprises a modified N-terminus and/or C-terminus. In some embodiments, the onconase polypeptide comprises one or more amino acid substitution in the N-terminus and/or C-terminus as compared to SEQ ID NO: 1. In some embodiments, the onconase polypeptide comprises 11 amino acid substitutions in the N-terminus as compared to SEQ ID NO: 1. In some embodiments, the onconase polypeptide comprises a sequence tag.

[0408] In some embodiments, the cell expresses a TAF12 polypeptide. In some embodiments, the TAF12 polypeptide is a variant TAF12 polypeptide. In some embodiments, the TAF12 polypeptide comprises the amino acid sequence of SEQ ID NO: 23. In some embodiments, the TAF12 polypeptide comprises an amino acid sequence that has at least 80%, at least 85%, at least 90%, at least 91%, at least 92%, at least 93%, at least 94%, at least 95%, at least 96%, at least 97%, at least 98%, or at least 99% sequence identity to SEQ ID NO: 23. In some embodiments, the TAF12 polypeptide comprises an amino acid sequence that has between 80% to 85%, 85% to 90%, 90% to 95%, or 95% to 100% sequence identity to SEQ ID NO: 23. In some embodiments, the cell expresses a TAF12 polypeptide comprising one or more amino acid substitutions compared to the amino acid sequence of SEQ ID NO: 23. In some embodiments, the TAF12 polypeptide comprises one or more insertions or deletions as compared to the amino acid sequence of SEQ ID NO: 23. In some embodiments, the cell expresses a TAF12 polypeptide comprising one or more amino acid substitutions that decrease susceptibility to chemical cleavage as compared to a TAF12 polypeptide having the amino acid sequence of SEQ ID NO: 23. In some embodiments, the cell expresses a TAF12 polypeptide comprising one or more deletions or insertions that reduce susceptibility to chemical cleavage as compared to a TAF12 polypeptide having the amino acid sequence of SEQ ID NO: 23.

[0409] In some embodiments, the cell expresses a TAF12 polypeptide comprising one or more amino acid substitutions, or one or more insertions or deletions that increase yield or promote formation of inclusion bodies as compared to a TAF12 polypeptide having the amino acid sequence of SEQ ID NO: 11.

[0410] In some embodiments, the TAF12 polypeptide comprises at least one amino acid sequence that has between 80% to 85%, 85% to 90%, 90% to 95%, or 95% to 100% sequence identity with any one of SEQ ID NOs: 12-14 and 31-2401. In some embodiments, the TAF12 polypeptide comprises a modified N-terminus and/or C-terminus. In some embodiments, the TAF12 polypeptide comprises one or more amino acid substitution in the N-terminus and/or C-terminus as compared to SEQ ID NO: 23. In some embodiments, the TAF12 polypeptide comprises 11 amino acid substitutions in the N-terminus as compared to SEQ ID NO: 23. In some embodiments, the TAF12 polypeptide comprises a sequence tag.

### X. Kits

[0411] Some aspects of the present disclosure provide for kits comprising any of the fusion polypeptides, insoluble carrier polypeptides (e.g., onconase polypeptides or TAF12 polypeptides), or oligopeptides of the disclosure; any of the nucleic acids or vectors encoding the fusion polypeptides, insoluble carrier polypeptides (e.g., onconase polypeptides or TAF12 polypeptides), or oligopeptides of the disclosure; or any of the cells expressing the fusion polypeptides, insoluble carrier polypeptides (e.g., onconase polypeptides or TAF12 polypeptides), or oligopeptides of the disclosure.

[0412] Also provided herein are kits for use with any of the methods of the disclosure.

### EXAMPLES

[0413] The following examples further illustrate the invention but should not be construed as in any way limiting its scope. In light of the present disclosure and the general level of skill in the art, those of skill will appreciate that the following Examples are intended to be exemplary only and that numerous changes, modifications, and alterations can be employed without departing from the scope of the presently disclosed subject matter. The attached figures are meant to be considered as integral parts of the specification and description of the disclosure.

### Example 1: Conditions for Release of Peptides from Onconase Inclusion Bodies

[0414] This example describes the evaluation of conditions for cleavage of D-P bonds to release a peptide from an onconase inclusion body for production of short peptides in E. coli.

### Methods

Peptide Release from an Onconase

[0415] The onconase fusion construct of (FIG. 1A) was expressed in E. coli. The bacteria cells were pelleted, after which the cell pellet was lysed through sonication. The cell lysate was pelleted by centrifugation. The pellet was then washed 3× times with TritonX-100 buffer (0.1 M Tris, 2% TritonX-100, 2 M urea, 10 mM EDTA, pH 7.4), followed by 2× washes with wash buffer (1 M Tris, pH 7.4), then washed with water. The purified inclusion bodies were then subject to chemical cleavage by adjusting to the target pH with HCl and incubation at 80° C. for 16 hours.

### Analysis of Peptide Expression

[0416] Reversed-phase-high performance liquid chromatography (RP-HPLC) analysis was used to estimate peptide yield and solubilization of the onconase (FIG. 1B).

### Results

[0417] In the first experiment, four pHs between 2 and 5 were tested (FIGS. 2A-2B). The onconase remained mostly as inclusion bodies, but the chemical cleavage was still reasonably efficient. The cleavage efficiency was most efficient in the range of pH 2 and pH 3.

[0418] A second experiment was conducted to determine an optimal balance between an efficient pH cleavage with a minimal amount of solubilized fusion protein. A cleavage pH from 2.4 to 2.8 were the optimal cleavage condition with a high level of released peptide and a low amount of solubilized fusion proteins (FIGS. 3A-B). Similar results were obtained using sulfuric acid to adjust the pH (data not shown).

[0419] To assess impact on amine groups, a model peptide containing a glutamine residue was tested. As depicted in FIGS. 4A-B, when cleavage pH is lowered below pH 3.0, glutamine containing peptide began to be converted from a basic form into an acidic form, which could be separated by reverse phase HPLC (FIG. 4A). This indicated that the glutamine was converted into glutamic acid under acidic conditions, likely through a deamidation reaction which is catalyzed by high temperature and acid conditions. This observation emphasizes the importance to work at pH above 2.6 for pH sensitive peptides bearing either asparagine or glutamine.

### Example 2: Comparison of Different Inclusion Body Forming Proteins

[0420] This example describes the evaluation of different inclusion body forming proteins for production of short peptides in E. coli.

[0421] Five different inclusion body forming proteins were compared (FIG. 5A): delta(5)-3-Ketosteroid isomerase (KSI), a polypeptide F4 fragment derived from PurF protein of 16.7 kDa (PurF); OmpX of E. coli (OmpX), the histone fold domain of the human transcription factor TAF12 (TAF12), and onconase. All constructs were cloned into pET28a plasmid-based expression system and BL21(DE3) bacterial strains were transformed and selected on kanamycin (50 μg/ml). Expressions tests were conducted 3 times independently in auto-inducible medium at 37° C. in flask (FIG. 5B). Peptide yields of the test Peptide A were estimated after chemical cleavage at pH 2.6 at 80° C. (overnight incubation ~16 hours) by RP-HPLC C18 column using a synthetic peptide of the same amino acid sequence at known concentrations.

[0422] All 5 fusions proteins were efficiently expressed and the bioproduced peptides were released under the test conditions.

### Example 3: A Concatemeric Strategy for Peptide Production in E. coli

[0423] This example describes the evaluation of a concatemeric strategy for production of short peptides in E. coli.

### Methods

### Peptide Production Using Onconase Concatemer

[0424] The onconase fusion constructs were expressed in E. coli. The bacteria cells were pelleted, after which the cell pellet was lysed through sonication. The cell lysate was pelleted by centrifugation. The pellet was then washed 3× times with TritonX-100 buffer (0.1 M Tris, 2% TritonX-100, 2 M urea, 10 mM EDTA, pH 7.4), followed by 2× washes with wash buffer (1 M Tris, pH 7.4), then, washed with water. The purified inclusion bodies were then solubilized by incubation in solubilization buffer (6 M guanidinium chloride, Tris 50 mM, 10 mM beta-mercaptoethanol, pH 7.4). The solubilized proteins were then refolded for onconase precipitation by extensive dialysis at 4° C. in 0.1 M acetic acid at pH 3.0, which results in guanidinium hydrochloride removal. The soluble fraction was cleaved by incubation in 0.1 M acetic acid at pH 2 and 60° C. for 24 hours. After cleavage, the onconase was precipitated from the solution by addition of NH₄OH buffer (pH 7.0-7.2). The peptide was then lyophilized for ammonium acetate removal and subsequently centrifuged.

### Analysis of Peptide Expression

[0425] Expression of the proteins was assessed by SDS-PAGE analysis of the insoluble fraction. Expression tests were performed at 37° C. in a commercial auto-inducible medium (Formedium, Ref. AIMTB02) using the BL21(DE3)STAR bacterial strain (Invitrogen, Ref. C601003).

### Results

[0426] A concatemeric onconase fusion strategy could be used to increased yield of small peptides (e.g. 10 amino acid long peptides). Concatemeric constructs can be designed as either homoconcatemers (FIG. 6A), with several copies of the same peptide separated by an acid cleavage site fused to the C-terminus of the onconase, or as heteroconcatemers (FIG. 6B), with different peptide sequences being added.

[0427] To determine whether the concatemeric strategy could be applied for efficient peptide production, onconase fusions with three different 10 amino acid-long hydrophilic peptides were prepared. The onconase fusions had either one or three copies of each peptide. As shown in FIG. 7, both the homoconcatemeric constructs and the heteroconcatemeric constructs were expressed at high levels. The addition of up to three copies of each peptide did not affect protein accumulation in inclusion bodies in large quantities.

[0428] To confirm that the concatemeric strategy is applicable to other inclusion body forming proteins, a fusion TAF12 construct with three identical peptides fused to the C-terminus was expressed. The inclusion bodies were washed as in Example 3 and then subject to cleavage by adjustment of the pH with HCl to pH 2.6 and incubation at 80° C. As shown on FIG. 8A, after 4 hours of cleavage, intermediate species corresponding to mono di- and tri-peptide species could be detected. With extended cleavage time, almost everything has been converted into the single peptide specie of interest (FIG. 8B).

### Example 4: Onconase N-Terminus Modifications for Increased Peptide Yield

[0429] This example describes the evaluation of variant onconase proteins for increasing peptide yield and purity.

### Methods

### Peptide Production Using Onconase Concatemers

[0430] Peptide production was performed as described in Example 3.

### Analysis of Peptide Yield and Quality

[0431] Reversed-phase-high performance liquid chromatography (RP-HPLC) analysis was used to estimate peptide yield. An average of three independent purifications were performed using an auto-inducible medium on a 50-ml flask scale.

[0432] The peptide quality analysis was performed by RP-HPLC with a C18 column (waters). The main miPEP species was quantified by comparison to injection of a known quantity of a chemically synthetized peptide (sb-PEPTIDE), which eluted at the same retention time. The yield per L of culture volume was extrapolated from the average signal detected, with three independents purifications for each construct.

### Results

[0433] Eight new onconase constructs with variant N-terminus sequences were generated (FIGS. 9A-9B), and the yield for the MP18357 peptide (SEQ ID NO: 12) using each construct was compared then compared. Each onconase fusion construct tested had only one copy of MP18357 at the C-terminus (FIG. 9A). The peptide quality and quantity were determined by reverse-phase-high performance liquid chromatography (RP-HPLC).

[0434] In contrast to the original onconase sequence, peptide yield increased by over 70% with 3 of the 8 constructs tested (FIG. 9C). Constructs A and B (FIG. 9B) yielded higher quantity of peptide, with similar peptide quality observed with the variant onconase as compared to the original onconase sequence (FIG. 10). Using constructs A and B, the main peptide species eluted at the same elution volume without detection of other important species (FIG. 10, insert in top and middle panels). Construct E represented an unsuccessful N-terminal modification, which resulted in higher quantities of peptide but of lesser quality (FIG. 10, bottom panel). The additional peptide species observed with may be due to non-specific cleavage.

### Example 5: Chemical Cleavage to Increase Yield and Peptide Homogeneity of Concatamerically-Produced Peptides

### Methods

[0435] Peptide purification and analysis of peptide yield was performed as described in Examples 3 and 4, with some modifications. Peptide cleavage was performed by solubilization and incubation of the soluble fraction in 20% acetic acid at pH 2 for 24 hours at either 40° C., 60° C., or 80° C. Peptide yield and quality was assessed by RP-HPLC at 2, 4 or 20 hours from start of incubation.

### Results

[0436] The use of homoconcatemer onconase fusions carrying three peptide copies resulted in incomplete peptide cleavage when performing acidic cleavage at 60° C. in acetic acid (FIGS. 11A-11B). Additional peaks were detected by RP-HPLC, indicating the presence of uncleaved dipeptide or tripeptide species (FIGS. 11A-11B).

[0437] To improve cleavage efficiency for release to be closer to 100% cleavage, different incubation times and cleavage temperatures were tested. As shown in FIG. 12A, at 40° C., incubation time marginally impacted cleavage efficiency, with around 25% of the peptide found as monopeptides even after 20 hours. Increasing the temperature to 60° C. was found to lead to better cleavage than 40° C., resulting in 75% of the peptide produced as monopeptide species (FIG. 12B). At 80° C., cleavage was better after 4 hours than at 60° C., with complete cleavage of the peptides was observed after 20 hours (FIG. 12C), and only a monopeptide fraction being recovered. The peptide quality was not affected by the use of a concatemeric construct. No further improvements were observed upon changing of the acetic acid concentration within a 20-50% range.

[0438] Increasing the cleavage temperature improved both the peptide homogeneity (FIGS. 12A-12C) and the peptide yield (FIG. 13) when using a concatemeric strategy as well as reducing the peptide purification time. The peptide yield at 80° C. was around 60% higher than at 60° C., mostly resulting from a higher monopeptide fraction recovery.

### Example 6: Direct Acetic Acid Solubilization and Development of a Chaotropic-Free Protocol

[0439] This example describes the development of a chaotropic-free protocol for peptide production using an onconase fusion construct.

### Methods

[0440] Peptide purification and analysis of peptide yield was performed as described in Examples 3 and 4, with some modifications. Direct solubilization of the inclusion bodies was performed using a protein concentration of either 20 g/L or 50 g/L incubated in formic acid or acetic acid at 60° C. or 80° C. Incubation was performed with 20%, 30%, 40% or 50% of acetic acid or formic acid (w/v).

### Results

[0441] Onconase solubility is highly pH-dependent and the onconase-fusion peptide production strategy is based on this feature. Direct solubilization at acidic pH might be sufficient to solubilize onconase and directly trigger acidic chemical cleavage at 80° C.

[0442] To test whether acidic pH conditions might sufficiently stabilize onconase and trigger acid cleavage, different concentrations of formic acid or acetic acid were tested for the ability to visually solubilize onconase inclusion bodies and directly perform peptide cleavage. Two concentrations of inclusion bodies (20 g/L at 60° C. and 50 g/L at 80° C.) were tested with either formic acid or acetic acid at concentrations ranging from 20-50% (FIGS. 14A-14B). Direct solubilization and cleavage of onconase was observed at 80° C. even when using an acetic acid concentration as low as 20% (w/v) and a high protein concentration of 50 g/L. Two peptide species were detected when the reaction was performed at 60° C., which corresponded to monopeptide and dipeptide species (FIG. 14A). The acetic concentration did not affect the peptide yield or quality. Increasing acetic acid concentration appeared to be detrimental, as a slight increase of dipeptide content was observed when acetic acid concentration was increased (FIG. 14B). FIGS. 14C and 14D show that cleavage with formic acid worked as well as acetic acid, but chemical cleavage was less specific than with acetic acid. As shown in FIG. 14C, with higher formic acid a shoulder was observed, suggesting a negative effect. The use of lower acetic acid concentrations further improves direct solubilization and cleavage while maximizing the protein concentration.

### Example 7: Development of Column-Free Downstream Purification Steps

[0443] In this example, the column-free downstream purification steps for peptide production using a concatemeric strategy were optimized.

### Methods

[0444] The onconase fusion constructs were expressed in bacteria cells. The bacteria cells were pelleted, after which the cell pellet was lysed through sonication. The cell lysate was pelleted by centrifugation. The pellet was then washed 2 times with TritonX-100 buffer at 37° C. (0.05 M Tris, 2% TritonX-100, pH 7.5), followed by 2× washes with high salt buffer (1 M NaCl, pH 12) and a 5-minute heat shock at 95° C., and finally washed 2× times with water. Inclusion bodies were then recovered by centrifugation after cooling down. The purified inclusion bodies were then solubilized and cleaved in acetic acid. After cleavage, the onconase was precipitated from the solution by addition of NH₄OH to pH 7.0-7.2. The peptide was then lyophilized for ammonium acetate removal and subsequently centrifuged.

### Results

[0445] Many current methods for peptide production require column-based separation methods. However, these methods result in additional steps and add cost to peptide production. Thus, production of peptides with a column-free method presents a significant advantage.

[0446] To optimize a column-free protocol, alternative steps for inclusion body isolation were tested. For example, solubilization with 2% SDS was effective for solubilizing the inclusion bodies but inhibited downstream cleavage and peptide release. Sarkozyl was effective at solubilizing inclusion bodies but was not effective under acidic conditions, so other conditions were tested.

[0447] Washing inclusion bodies with a high concentration of salt (1 M NaCl) at basic pH, followed by a heat shock at 95° C. to induce DNA unfolding was found to be the most efficient protocol (FIG. 15A).

[0448] At pH above protein isoelectric point, inclusion bodies are negatively charged, favoring DNA repulsion after thermal denaturation. The high salt concentration helps to “shield” inclusion bodies and avoid attracting nucleic acids once the sample temperature is lowered. Salt, heat shock or basic pH alone was not as effective to remove nucleic acid and the combination of all those parameters are important in reducing nucleic acid contamination during peptide purification.

### Example 8: Assessment of Peptide Yield with Optimized Peptide Production and Purification Protocol

[0449] This example shows that direct solubilization of inclusion bodies resulted in higher yield of peptide product.

### Methods

### Peptide Purification Using a Chaotropic Agent

[0450] The onconase fusion constructs were expressed in bacteria cells. The bacteria cells were pelleted, after which the cell pellet was lysed through sonication. The cell lysate was pelleted by centrifugation. The pellet was then washed 3× times with TritonX-100 buffer (0.1 M Tris, 2% TritonX-100, 2 M urea, 10 mM EDTA, pH 7.4), followed by 2× washes with wash buffer (1 M Tris, pH 7.4), then, washed with water. The purified inclusion bodies were then solubilized by incubation in solubilization buffer (6 M guanidinium chloride, Tris 50 mM, 10 mM beta-mercaptoethanol, pH 7.4). The solubilized proteins were then refolded by extensive dialysis at 4° C. in 0.1 M acetic acid at pH 3.0, which results in guanidinium hydrochloride removal. The soluble fraction was cleaved by incubation in 0.1 M acetic acid at pH 2 and 60° C. for 24 hours. After cleavage, the onconase was precipitated from the solution by addition of NH₄OH to pH 7.0-7.2. After centrifugation at 10,000×g for 5 minutes, the aggregated fusion protein was in the pellet and the cleaved peptide is in the supernatant. The peptide was then lyophilized for ammonium acetate removal.

### Chaotropic Agent-Free Peptide Purification Protocol

[0451] The onconase fusion was expressed in bacteria cells. The bacteria cells were pelleted, after which the cell pellet was lysed through sonication. The cell lysate was pelleted by centrifugation. The pellet was then washed 2 times with TritonX-100 buffer at 37° C. (0.05 M Tris, 2% TritonX-100, pH 7.5), followed by 2× washes with high salt buffer (1 M NaCl, pH 12) and a 5-minute heat shock at 95° C., and finally washed 2× times with water. The purified inclusion bodies were then solubilized and cleaved in acetic acid. After cleavage, the onconase was precipitated from the solution by addition of NH₄OH buffer to pH 7.0-7.2. After centrifugation at 10,000×g for 5 minutes, the aggregated fusion protein was in the pellet and the cleaved peptide is in the supernatant. The peptide was then lyophilized for ammonium acetate removal.

### Results

[0452] To assess whether a chaotropic-free protocol could result in better yields than a protocol requiring the use of a chaotropic agent, the yield of peptide produced using each protocol was assessed and compared.

[0453] To this end, onconase fusions with either one or three (concatemeric) peptide copies were used for peptide production following either the standard protocol (FIG. 15B) or a chaotropic agent-free protocol (FIG. 15A). The chaotropic agent-free protocol (FIG. 15B), which substituted the use of chaotropic agent and directly solubilized the inclusion bodies in 20% acetic acid, resulted in higher yield for all evaluated constructs (FIG. 16). Moreover, increasing the solubilization and cleavage temperature to 80° C., resulted in high peptide homogeneity and in more than 80% pure peptide of interest in the absence of any column use. As the chaotropic agent-free protocol involves fewer steps, it enabled faster and less labor-demanding peptide production, with reduced buffer/chemical consumption.

### Example 9: Functional Assay Against Tomato Grey Mold (Botrytis cinerea)

[0454] In this example, the effect of the cleavage scar on peptide function is evaluated.

### Methods

### Peptide Production

[0455] Peptide production was performed using the chaotropic agent-free protocol described in Example 8.

[0456] A synthetic peptide (MP18913), which mimics the concatemeric sequence with an N-terminus proline (P) and C-terminus aspartate (D), was chemically synthetized and used as a control treatment.

### Disease Control Assay

[0457] Peptide activity was assessed by a disease control assay using tomato plants infected with grey mold (Botrytis cinerea). Peptides were sprayed 24 h post infection at concentration of 0.1 g/l or 0.3 g/l. Disease control percentage was determined based on convex hull recovery, with a total of 7 plants examined (n=7) upon infection with Botrytis spores at 250 spores/ml.

### Results

[0458] Acetic acid cleaves at aspartate-proline (Asp-Pro) peptide bonds. Chemical cleavage of the onconase concatemeric fusions using acetic acid thus results in peptides having an N-terminal Pro residue and a C-terminal Asp residue in addition to the peptide sequence.

[0459] To test whether a peptide having the N-terminal Pro and C-terminal Asp amino acids was still functional, the MP18913 (SEQ ID NO: 14) peptide obtained either by bioproduction or from chemical synthesis were compared. MP18913 corresponds to a modified MP18357 peptide that has an additional proline residue (Pro) at the N-terminus and an aspartate residue (Asp) at C-terminus. Chemically-synthesized MP18913 mimics the concatemeric sequence with the addition of a proline (P) and an aspartate (D) at the N-terminus and C-terminus of the sequence, respectively. MP18913 was found to be as effective, or slightly more effective, than the chemically synthetized version in controlling tomato grey mold (Botrytis cinerea) infection (FIG. 17). Bio-produced MP18913 also provided even better protection against tomato grey mold than MP18357. The bio-produced version of MP18913 (MP18913-BPD) provides slightly better disease control, with up to 50% disease control, and appears to work best at 0.3 g/l. The addition of the proline and aspartate residues did not affect functionality of the peptides.

### Example 10: Evaluation of Concatemeric Constructs with Both N- and C-Peptide Additions

[0460] This example describes the generation of alternative concatemeric constructs for increased peptide yield.

### Methods

### Peptide Production

[0461] Peptide production is performed using the chaotropic agent-free protocol described in Example 8.

### Results

[0462] As described in Example 4, N-terminus modification of the onconase fusions is feasible and can lead to higher peptide yield. Concatemeric constructs with peptide copies at the N-terminus and/or additional peptide copies at the C-terminus (FIG. 18A) might also lead to increased peptide production.

[0463] To test whether onconase concatemers having N-terminal peptides could be used for increased peptide production, constructs expressing 4 to 6 copies of the MP18357 peptide were designed (FIG. 18A). These constructs are then expressed in E. coli and evaluated for expression and peptide yield. Using the same expression and purification method, the expression and peptide yield obtained using these constructs are compared to a similar construct having only peptide copy at the C-terminus.

### Results

[0464] As shown in FIG. 18B and FIG. 18C, each onconase fusion protein construct with up to six copies of the oligopeptide was expressed at a high level, regardless of whether the peptide was located at the N terminus or C terminus. This demonstrates that even up to six copies of the hydrophilic oligopeptide did not affect the onconase carrier activity.

[0465] Moreover, HPLC analysis performed after cleavage shows that chemical cleavage was still efficient with additional copies of the oligopeptide at the N and C-termini. (FIG. 19). Indeed, a peak reflecting the single oligopeptide was observed and a smaller peak representing the single oligopeptide with a methionine for constructs 1×3 and 2×3 which comprise N-terminal oligopeptides.

### Example 11: Onconase Variants with Reduced pKa for Increased Peptide Yield

[0466] This example describes the evaluation of variant onconase proteins with reduced pKa for increasing peptide yield and purity. Without being bound by theory, decreasing the pI of the onconase protein may reduce the positive charge and thereby reduce the fusion protein tendency to bind to negatively charged nucleic acid. Thus reducing the pI of the onconase protein may increase purity of the fusion protein. Methods

[0467] The onconase fusion constructs were expressed in bacteria cells. The bacteria cells were pelleted, after which the cell pellet was lysed through sonication. The cell lysate was pelleted by centrifugation. The pellet was then washed 2 times with TritonX-100 buffer at 37° C. (0.05 M Tris, 2% TritonX-100, pH 7.5), followed by 2× washes with high salt buffer (1 M NaCl, pH 12) and a 5-minute heat shock at 95° C., and finally washed 2× times with water. Inclusion bodies were then recovered by centrifugation after cooling down. The purified inclusion bodies were then solubilized and cleaved in acetic acid. After cleavage, the onconase was precipitated from the solution by addition of NH₄OH buffer (pH 7.0-7.2). The peptide was then lyophilized for ammonium acetate removal and subsequently centrifuged.

### Results

[0468] Modification of the onconase sequence to reduce onconase pKa, such as by mutating lysine residues to alanine residues, would likely reduce nucleic acid binding and allow washing at lower pH conditions. FIG. 20A shows an alignment of the onconase protein of SEQ ID NO:1 and a variant with three lysine to alanine substitutions. As shown in FIG. 20B, the variant with three alanine substitutions has a lower pI (8.78 compared to 9.21). Mutating three lysine residues in the onconase to alanine did not affect onconase expression or its ability to function as a fusion partner.

[0469] Additional onconase variants are produced that have a lower pI, such as those shown in FIG. 20B. Table 1 shows the estimated pI for the onconase of SEQ ID NO: 1 and the onconase variant comprising three lysine to alanine substitutions. Table 2 shows the predicted pI of the onconase fusion protein constructs. Fusion proteins comprising oligopeptides fused to the onconase variants are expressed and peptides are purified.

TABLE 1
Estimated pI for the onconase of SEQ ID NO: 1 and an onconase
variant comprising three lysine to alanine substitutions.

| Construction | ONCHis_MP18357x1 | ONC_dHK_MP18357x1 |
|---|---|---|
| Estimated pI | 9.21 | 8.78 |

TABLE 2
Estimated pI for onconase fusion proteins.

| Construction | Estimated pI |
|---|---|
| ONCMP1 | 8.78 |
| MP18357x1 | |
| ONCMP2 | 8.31 |
| MP18357x1 | |
| ONCMP3 | 7.56 |
| MP18357x1 | |
| ONCMP4 | 6.95 |
| MP18357x1 | |
| ONCMP5 | 6.16 |
| MP18357x1 | |
| ONCMP6 | 5.50 |
| MP18357x1 | |
| ONCMP7 | 5.10 |
| MP18357x1 | |
| ONCMP8 | 4.87 |
| MP18357x1 | |

[0470] Expression levels of fusion proteins and peptides are compared between onconase variants.

### Example 12: Materials for Scalable Biomanufacturing Processes

[0471] This example describes raw materials and processes for cost-efficient and highly scalable peptide biomanufacturing processes that have been conducted according to the methods provided herein.

### Results

[0472] Peptide production at large industrial scales has been accomplished using the methods provided herein to conduct highly efficient bioprocesses that leverage the physiochemical properties of short, linear, and hydrophilic micropeptides using tailor-made engineered E. coli strains that converted simple nutrients into micropeptides. Well-optimized and highly reliable fermentation processes ensured high peptide expression after 2-stage batch fermentation.

[0473] In the first stage, comprising strain engineering (FIG. 21A), inclusion body production lead to highly protected peptides via chromosomal integration in E. coli of multiple copies of a nucleic acid sequence encoding a fusion carrier protein linked by 2-amino acid-long linkers to a concatemer of peptide sequences linked by 2-amino acid-long linkers. The characteristics of the fusion protein were optimized for high peptide expression, yield, and efficient peptide purification. The concatemeric strategy was scaled to maximize peptide expression by including 2-10 copies of the peptide sequences linked by 2-amino acid-long linkers. Inclusion bodies comprised a very stable matrix of the carrier protein and the peptide concatemer. The second stage involved batch growth (FIG. 21B).

SEQUENCE LISTING

| | | SEQ |
|---|---|---|
| Sequence | Sequence | ID |
| description | (N-terminus to C-terminus; or 5 to 3′) | NO: |
| Onconase | MGQEWLTFQKKHITNTREVEYENILSTNLFHYKEKNTFIYSRPEPV | 1 |
| polypeptide | KAILKGIIASKNVLTTSEFYLSEYNVTSRPYKYKLKKSTNKFIVTIEN | |
| | QAPVHFVGGSHHHHHHGTGDP | |
| Onconase N- | MGQEWLTFQKK- | 2 |
| terminus | HITNTREVEYENILSTNLFHYKEKNTFIYSRPEPVKAILKGIIASKNV | |
| sequence | LTTSEFYLSEYNVTSRPYKYKLKKSTNKFIVTIENQAPVHFVGGSH | |
| | HHHHHGTGDP | |
| Onconase | MELHFELLYKW- | 3 |
| variant A N- | HITNTREVEYENILSTNLFHYKEKNTFIYSRPEPVKAILKGIIASKNV | |
| terminus | LTTSEFYLSEYNVTSRPYKYKLKKSTNKFIVTIENQAPVHFVGGSH | |
| sequence | HHHHHGTGDP | |
| Onconase | MASMTGGQQMG- | 4 |
| variant B N- | HITNTREVEYENILSTNLFHYKEKNTFIYSRPEPVKAILKGIIASKNV | |
| terminus | LTTSEFYLSEYNVTSRPYKYKLKKSTNKFIVTIENQAPVHFVGGSH | |
| sequence | HHHHHGTGDPW | |
| Onconase | MRRKKRPDPDSW- | 5 |
| variant C N- | HITNTREVEYENILSTNLFHYKEKNTFIYSRPEPVKAILKGIIASKNV | |
| terminus | LTTSEFYLSEYNVTSRPYKYKLKKSTNKFIVTIENQAPVHFVGGSH | |
| sequence | HHHHHGTGDP | |
| Onconase | MTKEAERLDVP- | 6 |
| variant D N- | HITNTREVEYENILSTNLFHYKEKNTFIYSRPEPVKAILKGIIASKNV | |
| terminus | LTTSEFYLSEYNVTSRPYKYKLKKSTNKFIVTIENQAPVHFVGGSH | |
| sequence | HHHHHGTGDPW | |
| Onconase | MPEEVFHGDAHW- | 7 |
| variant E N- | HITNTREVEYENILSTNLFHYKEKNTFIYSRPEPVKAILKGIIASKNV | |
| terminus | LTTSEFYLSEYNVTSRPYKYKLKKSTNKFIVTIENQAPVHFVGGSH | |
| sequence | HHHHHGTGDP | |
| Onconase | MTHTIKAMEPKW- | 8 |
| variant F N- | HITNTREVEYENILSTNLFHYKEKNTFIYSRPEPVKAILKGIIASKNV | |
| terminus | LTTSEFYLSEYNVTSRPYKYKLKKSTNKFIVTIENQAPVHFVGGSH | |
| sequence | HHHHHGTGDP | |
| Onconase | MERHVVEQQLW- | 9 |
| variant G- | HITNTREVEYENILSTNLFHYKEKNTFIYSRPEPVKAILKGIIASKNV | |
| terminus | LTTSEFYLSEYNVTSRPYKYKLKKSTNKFIVTIENQAPVHFVGGSH | |
| sequence | HHHHHGTGDP | |
| Onconase | MKRRVILFSSQW- | 10 |
| variant H N- | HITNTREVEYENILSTNLFHYKEKNTFIYSRPEPVKAILKGIIASKNV | |
| terminus | LTTSEFYLSEYNVTSRPYKYKLKKSTNKFIVTIENQAPVHFVGGSH | |
| sequence | HHHHHGTGDP | |
| Chemical | DP | 11 |
| cleavage linker | | |
| sequence | | |
| MP18357 | KKEEMSYMKR | 12 |
| MP18366 | MEGNGTLSFA | 13 |
| MP18913 | PKKEEMSYMKRD | 14 |
| Concatemeric | MELNHFELLYKWHITNTREVEYENILSTNLFHYK | 15 |
| onconase fusion | EKNTFIYSRPEPVKAILKGIIASKNVLTTSEFYLSEY | |
| construct A | NVTSRPYKYKLKKSTNKFIVTIENQAPVH | |
| | FVGGSHHHHHHGTGDPKKEEMSYMKR* | |
| Concatemeric | MASMTGGQQMGWHITNTREVEYENILSTNLFH | 16 |
| onconase fusion | YKEKNTFIYSRPEPVKAILKGIIASKNVLTTSEFY | |
| construct B | LSEYNVTSRPYKYKLKKSTNKFIVTIENQAPVH | |
| | FVGGSHHHHHHGTGDPKKEEMSYMKR* | |
| Concatemeric | MRRKKRPDPDSWHITNTREVEYENILSTNLFHYK | 17 |
| onconase fusion | EKNTFIYSRPEPVKAILKGIIASKNVLTTSEFYLSEY | |
| construct C | NVTSRPYKYKLKKSTNKFIVTIENQAPVHFVGGSH | |
| | HHHHHGTGDPKKEEMSYMKR* | |
| Concatemeric | MTKEAERLDVPWHITNTREVEYENILSTNLFHYK | 18 |
| onconase fusion | EKNTFIYSRPEPVKAILKGIIASKNVLTTSEFYLSEY | |
| construct D | NVTSRPYKYKLKKSTNKFIVTIENQAPVHFVGGSH | |
| | HHHHHGTGDPKKEEMSYMKR* | |
| Concatemeric | MPEEVFHGDAHWHITNTREVEYENILSTNLFHYK | 19 |
| onconase fusion | EKNTFIYSRPEPVKAILKGIIASKNVLTTSEFYLSEY | |
| construct E | NVTSRPYKYKLKKSTNKFIVTIENQAPVHFVGGSHH | |
| | HHHHGTGDPKKEEMSYMKR* | |
| Concatemeric | MTHTIKAMEPFWHITNTREVEYENILSTNLFHYK | 20 |
| onconase fusion | EKNTFIYSRPEPVKAILKGIIASKNVLTTSEFYLSEY | |
| construct F | NVTSRPYKYKLKKSTNKFIVTIENQAPVHFVGGSH | |
| | HHHHHGTGDPKKEEMSYMKR* | |
| Concatemeric | MERHVVEQQLWHITNTREVEYENILSTNLFHYKEK | 21 |
| onconase fusion | NTFIYSRPEPVKAILKGIIASKNVLTTSEFYLSEYNV | |
| construct G | TSRPYKYKLKKSTNKFIVTIENQAPVHFVGGSHHH | |
| | HHHGTGDPKKEEMSYMKR* | |
| Concatemeric | MKRRVILFSSQWHITNTREVEYENILSTNLFHYKEK | 22 |
| onconase fusion | NTFIYSRPEPVKAILKGIIASKNVLTTSEFYLSEYNV | |
| construct H | TSRPYKYKLKKSTNKFIVTIENQAPVHFVGCGSHH | |
| | HHHHGTGDPKKEEMSYMKR* | |
| TAF12 | MVLTKKKLQELVREVAPNEQLEEEVEEMLLQIAEEFIESVVTAAAQ | 23 |
| | LARHRKSSTLEVKEVQLHLERQWNMWL | |
| PurF | MGIVGIAGVMPVNQSIYDALTVLQHRGQDAAGIITIDANNCFRLRK | 24 |
| | ANGLVSDVFEARHMQRLQGNMGIGHVRYPTAGSSSASEAQPFYV | |
| | NSPYGITLAHNGNLTNAHELRKKLFEEKRRHINTTSDSEILLNIFAS | |
| | ELDNFRHYPLEA | |
| OmpX | MATSTVTGGYAQSDAQGQMNKMGGFNLKYRYEEDNSPLGVIGSF | 25 |
| | TYTEKSRTASSGDYNKNQYYGITAGPAYRINDWASIYGVVGVGYG | |
| | KFQTTEYPTYKHDTSDYGFSYGAGLQFNPMENVALDFSYEQSRIRS | |
| | VDVGTWIAGVGYRL | |
| KSI | MHTPEHITAVVQRFVAALNAGDLDGIVALFADDATVEEPVGSEPR | 26 |
| | SGTAAIREFYANSLKLPLAVELTQEVRAVANEAAFAFTVSFEYQGR | |
| | KTVVAPIDHFRFNGAGKVVSIRALFGEKNIHACQML | |
| Linker Sequence | GGSGTG | 27 |
| Linker 2 | GGGS | 28 |
| Linker 3 | GGG | 29 |
| Linker 4 | GSGS | 30 |
| Linker 5 | GSGSGGT | 31 |
| Linker 6 | GTGSGTG | 32 |
| Linker 7 | EAAAK | 33 |
| Additional | See supplemental sequence listing, which includes under <223> for each | 34- |
| peptides | sequence: family function, peptide family, and a description | 2401 |

1.-179. (canceled)

180. A method of producing oligopeptides in a bacteria cell, comprising:
expressing a fusion polypeptide comprising an insoluble carrier polypeptide operably linked to two or more oligopeptides by a peptide bond, and
releasing the two or more oligopeptides from the insoluble carrier polypeptide by sequence-specific chemical cleavage of the peptide bond,
wherein the insoluble carrier polypeptide comprises a TAF12 polypeptide that consists of SEQ ID NO:23, or a modified TAF12 polypeptide defined as having an amino acid sequence having at least 90%, at least 91%, at least 92%, at least 93%, at least 94%, at least 95%, at least 96%, at least 97%, at least 98%, at least 99% to SEQ ID NO:23.

181. The method of claim 180, wherein the different sequence-specific chemical cleavage is an acidic cleavage.

182. The method of claim 181, wherein the acid is a strong acid.

183. The method of claim 182, wherein the acid is sulfuric acid.

184. The method of claim 180, wherein the peptide bond is an Asp-Pro bond, whereby the released oligopeptides optionally comprise an N-terminal proline or a C-terminal aspartic acid or comprise both an N-terminal proline and the C-terminal aspartic acid.

185. The method of claim 180, wherein the fusion polypeptide comprises three or more oligopeptides, four or more oligopeptides, five or more oligopeptides, six or more oligopeptides, eight or more oligopeptides, ten or more oligopeptides, fifteen or more oligopeptides, or twenty or more oligopeptides.

186. The method of claim 180, wherein all the oligopeptides are operably linked to the C-terminus of the insoluble carrier polypeptide.

187. The method of claim 180 wherein the bacteria is E. coli.

188. The method of claim 187, wherein the bacteria is a BL21 E. coli.

189. The method of claim 180, comprising a step of purifying the inclusion bodies formed by the fusion polypeptide in the bacteria cell, wherein the step of purifying the inclusion bodies comprises
lysing the cell to form a cell lysate,
centrifuging the cell lysate to form a pellet,
washing the pellet in a surfactant buffer comprising a nonionic surfactant at least once, at least twice, or at least three times,
washing the pellet in a salt buffer comprising at least 0.5M NaCl at least once, at least twice, or at least three times, and
washing the pellet in water at least once, at least twice, or at least three times, and thereby producing purified inclusion bodies.

190. The method of claim 189, comprising a step of purifying the inclusion bodies formed by the fusion polypeptide in the bacteria cell and a subsequent step of incubating the inclusion bodies with acid at a temperature of greater than 50° C., for at least one hour, wherein the oligopeptide is released from the fusion polypeptide by sequence-specific cleavage of the peptide bond.

191. The method of claim 190, wherein the step of incubating the inclusion bodies with acid is conducted at a temperature of greater than 80° C.

192. The method of claim 190, wherein the step of incubating the inclusion bodies with acid is conducted at a temperature at a pH below 3.0, preferably from 2.6 to 2.8.

193. The method of claim 180, wherein the cleavage takes place for about 1-24 hours at a pH of about 2-3.5 and a temperature of about 70° C.-90° C.

194. A fusion polypeptide comprising an insoluble carrier polypeptide operably linked to two or more oligopeptides, wherein the operably linkage between the two or more oligopeptides and the insoluble carrier polypeptide comprise a peptide bond that is capable of sequence-specific chemical cleavage, wherein the insoluble carrier polypeptide comprises a TAF12 polypeptide that consists of SEQ ID NO:23, or a modified TAF12 polypeptide defined as having an amino acid sequence having at least 90%, at least 91%, at least 92%, at least 93%, at least 94%, at least 95%, at least 96%, at least 97%, at least 98%, at least 99% to SEQ ID NO:23.

195. The fusion polypeptide of claim 194, wherein the different sequence-specific chemical cleavage is an acidic cleavage, and wherein the peptide bond is preferably an Asp-Pro bond.

196. The fusion polypeptide of claim 194, wherein the fusion polypeptide comprises three or more oligopeptides, four or more oligopeptides, five or more oligopeptides, six or more oligopeptides, eight or more oligopeptides, ten or more oligopeptides, fifteen or more oligopeptides, or twenty or more oligopeptides.

197. The fusion polypeptide of claim 194, wherein all the oligopeptides are operably linked to the C-terminus of the insoluble carrier polypeptide.

198. A nucleic acid encoding the fusion polypeptide as defined in claim 194.

199. A bacterial cell comprising a nucleic acid encoding the fusion polypeptide as defined in claim 194.

200. The bacterial cell of claim 199, wherein the bacterial cell is a E. coli cell.

201. The bacterial cell of claim 200, wherein the bacterial cell is a BL21 E. coli cell.

The application's sequence listing, which the Patent Office published only in electronic form, follows.

SEQUENCE LISTING (2421 sequences)

SEQ ID NO: 1 - protein, 115 aa, synthetic construct
  REGION 1..115: note = Synthetic Construct
MGQEWLTFQKKHITNTREVEYENILSTNLFHYKEKNTFIYSRPEPVKAILKGIIASKNVLTTSEFYLSEYNVTSRPYKYKLKKSTNKFIVTIENQAPVHFVGGSHHHHHHGTGDP

SEQ ID NO: 2 - protein, 115 aa, synthetic construct; identical to SEQ ID NO: 1
  REGION 1..115: note = Synthetic Construct

SEQ ID NO: 3 - protein, 115 aa, synthetic construct
  REGION 1..115: note = Synthetic Construct
MELHFELLYKWHITNTREVEYENILSTNLFHYKEKNTFIYSRPEPVKAILKGIIASKNVLTTSEFYLSEYNVTSRPYKYKLKKSTNKFIVTIENQAPVHFVGGSHHHHHHGTGDP

SEQ ID NO: 4 - protein, 116 aa, synthetic construct
  REGION 1..116: note = Synthetic Construct
MASMTGGQQMGHITNTREVEYENILSTNLFHYKEKNTFIYSRPEPVKAILKGIIASKNVLTTSEFYLSEYNVTSRPYKYKLKKSTNKFIVTIENQAPVHFVGGSHHHHHHGTGDPW

SEQ ID NO: 5 - protein, 116 aa, synthetic construct
  REGION 1..116: note = Synthetic Construct
MRRKKRPDPDSWHITNTREVEYENILSTNLFHYKEKNTFIYSRPEPVKAILKGIIASKNVLTTSEFYLSEYNVTSRPYKYKLKKSTNKFIVTIENQAPVHFVGGSHHHHHHGTGDP

SEQ ID NO: 6 - protein, 116 aa, synthetic construct
  REGION 1..116: note = Synthetic Construct
MTKEAERLDVPHITNTREVEYENILSTNLFHYKEKNTFIYSRPEPVKAILKGIIASKNVLTTSEFYLSEYNVTSRPYKYKLKKSTNKFIVTIENQAPVHFVGGSHHHHHHGTGDPW

SEQ ID NO: 7 - protein, 116 aa, synthetic construct
  REGION 1..116: note = Synthetic Construct
MPEEVFHGDAHWHITNTREVEYENILSTNLFHYKEKNTFIYSRPEPVKAILKGIIASKNVLTTSEFYLSEYNVTSRPYKYKLKKSTNKFIVTIENQAPVHFVGGSHHHHHHGTGDP

SEQ ID NO: 8 - protein, 116 aa, synthetic construct
  REGION 1..116: note = Synthetic Construct
MTHTIKAMEPKWHITNTREVEYENILSTNLFHYKEKNTFIYSRPEPVKAILKGIIASKNVLTTSEFYLSEYNVTSRPYKYKLKKSTNKFIVTIENQAPVHFVGGSHHHHHHGTGDP

SEQ ID NO: 9 - protein, 115 aa, synthetic construct
  REGION 1..115: note = Synthetic Construct
MERHVVEQQLWHITNTREVEYENILSTNLFHYKEKNTFIYSRPEPVKAILKGIIASKNVLTTSEFYLSEYNVTSRPYKYKLKKSTNKFIVTIENQAPVHFVGGSHHHHHHGTGDP

SEQ ID NO: 10 - protein, 116 aa, synthetic construct
  REGION 1..116: note = Synthetic Construct
MKRRVILFSSQWHITNTREVEYENILSTNLFHYKEKNTFIYSRPEPVKAILKGIIASKNVLTTSEFYLSEYNVTSRPYKYKLKKSTNKFIVTIENQAPVHFVGGSHHHHHHGTGDP

SEQ ID NO: 11 - skipped

SEQ ID NO: 12 - protein, 10 aa, synthetic construct
  REGION 1..10: note = Synthetic Construct
KKEEMSYMKR

SEQ ID NO: 13 - protein, 10 aa, synthetic construct
  REGION 1..10: note = Synthetic Construct
MEGNGTLSFA

SEQ ID NO: 14 - protein, 12 aa, synthetic construct
  REGION 1..12: note = Synthetic Construct
PKKEEMSYMKRD

SEQ ID NO: 15 - protein, 126 aa, synthetic construct
  REGION 1..126: note = Synthetic Construct
MELNHFELLYKWHITNTREVEYENILSTNLFHYKEKNTFIYSRPEPVKAILKGIIASKNVLTTSEFYLSEYNVTSRPYKYKLKKSTNKFIVTIENQAPVHFVGGSHHHHHHGTGDPKKEEMSYMKR

SEQ ID NO: 16 - protein, 126 aa, synthetic construct
  REGION 1..126: note = Synthetic Construct
MASMTGGQQMGWHITNTREVEYENILSTNLFHYKEKNTFIYSRPEPVKAILKGIIASKNVLTTSEFYLSEYNVTSRPYKYKLKKSTNKFIVTIENQAPVHFVGGSHHHHHHGTGDPKKEEMSYMKR

SEQ ID NO: 17 - protein, 126 aa, synthetic construct
  REGION 1..126: note = Synthetic Construct
MRRKKRPDPDSWHITNTREVEYENILSTNLFHYKEKNTFIYSRPEPVKAILKGIIASKNVLTTSEFYLSEYNVTSRPYKYKLKKSTNKFIVTIENQAPVHFVGGSHHHHHHGTGDPKKEEMSYMKR

SEQ ID NO: 18 - protein, 126 aa, synthetic construct
  REGION 1..126: note = Synthetic Construct
MTKEAERLDVPWHITNTREVEYENILSTNLFHYKEKNTFIYSRPEPVKAILKGIIASKNVLTTSEFYLSEYNVTSRPYKYKLKKSTNKFIVTIENQAPVHFVGGSHHHHHHGTGDPKKEEMSYMKR

SEQ ID NO: 19 - protein, 126 aa, synthetic construct
  REGION 1..126: note = Synthetic Construct
MPEEVFHGDAHWHITNTREVEYENILSTNLFHYKEKNTFIYSRPEPVKAILKGIIASKNVLTTSEFYLSEYNVTSRPYKYKLKKSTNKFIVTIENQAPVHFVGGSHHHHHHGTGDPKKEEMSYMKR

SEQ ID NO: 20 - protein, 126 aa, synthetic construct
  REGION 1..126: note = Synthetic Construct
MTHTIKAMEPFWHITNTREVEYENILSTNLFHYKEKNTFIYSRPEPVKAILKGIIASKNVLTTSEFYLSEYNVTSRPYKYKLKKSTNKFIVTIENQAPVHFVGGSHHHHHHGTGDPKKEEMSYMKR

SEQ ID NO: 21 - protein, 125 aa, synthetic construct
  REGION 1..125: note = Synthetic Construct
MERHVVEQQLWHITNTREVEYENILSTNLFHYKEKNTFIYSRPEPVKAILKGIIASKNVLTTSEFYLSEYNVTSRPYKYKLKKSTNKFIVTIENQAPVHFVGGSHHHHHHGTGDPKKEEMSYMKR

SEQ ID NO: 22 - protein, 127 aa, synthetic construct
  REGION 1..127: note = Synthetic Construct
MKRRVILFSSQWHITNTREVEYENILSTNLFHYKEKNTFIYSRPEPVKAILKGIIASKNVLTTSEFYLSEYNVTSRPYKYKLKKSTNKFIVTIENQAPVHFVGCGSHHHHHHGTGDPKKEEMSYMKR

SEQ ID NO: 23 - protein, 73 aa, synthetic construct
  REGION 1..73: note = Synthetic Construct
MVLTKKKLQELVREVAPNEQLEEEVEEMLLQIAEEFIESVVTAAAQLARHRKSSTLEVKEVQLHLERQWNMWL

SEQ ID NO: 24 - protein, 149 aa, synthetic construct
  REGION 1..149: note = Synthetic Construct
MGIVGIAGVMPVNQSIYDALTVLQHRGQDAAGIITIDANNCFRLRKANGLVSDVFEARHMQRLQGNMGIGHVRYPTAGSSSASEAQPFYVNSPYGITLAHNGNLTNAHELRKKLFEEKRRHINTTSDSEILLNIFASELDNFRHYPLEA

SEQ ID NO: 25 - protein, 149 aa, synthetic construct
  REGION 1..149: note = Synthetic Construct
MATSTVTGGYAQSDAQGQMNKMGGFNLKYRYEEDNSPLGVIGSFTYTEKSRTASSGDYNKNQYYGITAGPAYRINDWASIYGVVGVGYGKFQTTEYPTYKHDTSDYGFSYGAGLQFNPMENVALDFSYEQSRIRSVDVGTWIAGVGYRL

SEQ ID NO: 26 - protein, 127 aa, synthetic construct
  REGION 1..127: note = Synthetic Construct
MHTPEHITAVVQRFVAALNAGDLDGIVALFADDATVEEPVGSEPRSGTAAIREFYANSLKLPLAVELTQEVRAVANEAAFAFTVSFEYQGRKTVVAPIDHFRFNGAGKVVSIRALFGEKNIHACQML

SEQ ID NO: 27 - protein, 6 aa, synthetic construct
  REGION 1..6: note = Synthetic Construct
GGSGTG

SEQ ID NO: 28 - protein, 4 aa, synthetic construct
  REGION 1..4: note = Synthetic Construct
GGGS

SEQ ID NO: 29 - skipped

SEQ ID NO: 30 - protein, 4 aa, synthetic construct
  REGION 1..4: note = Synthetic Construct
GSGS

SEQ ID NO: 31 - protein, 7 aa, synthetic construct
  REGION 1..7: note = Synthetic Construct
GSGSGGT

SEQ ID NO: 32 - protein, 7 aa, synthetic construct
  REGION 1..7: note = Synthetic Construct
GTGSGTG

SEQ ID NO: 33 - protein, 5 aa, synthetic construct
  REGION 1..5: note = Synthetic Construct
EAAAK

SEQ ID NO: 34 - protein, 8 aa, Olea europaea
  REGION 1..8: note = ACE-inhibitor; --NA--; --NA--
AFDAVGVK

SEQ ID NO: 35 - protein, 6 aa, Arachis hypogaea
  REGION 1..6: note = ACE-inhibitor; --NA--; --NA--
KLYMRP

SEQ ID NO: 36 - protein, 7 aa, Olea europaea
  REGION 1..7: note = ACE-inhibitor; --NA--; --NA--
LFSGGES

SEQ ID NO: 37 - protein, 5 aa, Olea europaea
  REGION 1..5: note = ACE-inhibitor; --NA--; --NA--
LLPSY

SEQ ID NO: 38 - protein, 5 aa, Olea europaea
  REGION 1..5: note = ACE-inhibitor; --NA--; --NA--
LMSPH

SEQ ID NO: 39 - protein, 5 aa, Olea europaea
  REGION 1..5: note = ACE-inhibitor; --NA--; --NA--
LPAGA

SEQ ID NO: 40 - protein, 8 aa, Olea europaea
  REGION 1..8: note = ACE-inhibitor; --NA--; --NA--
LVVDGEGY

SEQ ID NO: 41 - protein, 7 aa, Olea europaea
  REGION 1..7: note = ACE-inhibitor; --NA--; --NA--
VGVPGGV

SEQ ID NO: 42 - protein, 8 aa, Microtoena prainiana
  REGION 1..8: note = ACE-inhibitor; Orbitide; Inhibited angiotensin converting enzyme (ACE) activity.
PIPLPFNY

SEQ ID NO: 43 - protein, 8 aa, Pseudostellaria heterophylla
  REGION 1..8: note = ACE-inhibitor; Orbitide; Inhibited angiotensin converting enzyme (ACE) activity.
PPPIFGGL

SEQ ID NO: 44 - protein, 8 aa, Microtoena prainiana
  REGION 1..8: note = ACE-inhibitor; Orbitide; Inhibited angiotensin converting enzyme (ACE) activity.
PVAFPVLY

SEQ ID NO: 45 - protein, 8 aa, Microtoena prainiana
  REGION 1..8: note = ACE-inhibitor; Orbitide; Inhibited angiotensin converting enzyme (ACE) activity.
PVFFAAGF

SEQ ID NO: 46 - protein, 7 aa, Pseudostellaria heterophylla
  REGION 1..7: note = ACE-inhibitor; Orbitide; Inhibited angiotensin converting enzyme (ACE) activity.
PVIFGIT

SEQ ID NO: 47 - protein, 11 aa, Solanum lycopersicum
  REGION 1..11: note = ACE-inhibitor; ACE inhibitory peptide; Shows angiotensin-I converting enzyme (ACE-I) inhibitory activity and DPPH activity. B. subtilis f
AARLDPGLQAN

SEQ ID NO: 48 - protein, 17 aa, Maclura pomifera
  REGION 1..17: note = ACE-inhibitor; Bioactive peptides; Shows the highest inhibition of angiotensin-converting enzyme (ACE) and the presence of bioactive
AAVRSPAQILQWQVLSN

SEQ ID NO: 49 - protein, 10 aa, Solanum lycopersicum
  REGION 1..10: note = ACE-inhibitor; ACE inhibitory peptide; Shows angiotensin-I converting enzyme (ACE-I) inhibitory activity and DPPH activity. B. subtilis f
ADVTEPPLPP

SEQ ID NO: 50 - protein, 6 aa, Solanum lycopersicum
  REGION 1..6: note = ACE-inhibitor; ACE inhibitory peptide; Shows angiotensin-I converting enzyme (ACE-I) inhibitory activity and DPPH activity. B. subtilis f
AIGPHH

SEQ ID NO: 51 - protein, 6 aa, Hordeum vulgare
  REGION 1..6: note = ACE-inhibitor; "Alpha-amylase, trypsin inhibitor"; Shows angiotensin-I converting enzyme (ACE-I) inhibitory activity
ALRYFM

SEQ ID NO: 52 - protein, 10 aa, Maclura pomifera
  REGION 1..10: note = ACE-inhibitor; Bioactive peptides; Shows the highest inhibition of angiotensin-converting enzyme (ACE) and the presence of bioactive
AQPTTMARHP

SEQ ID NO: 53 - protein, 7 aa, Solanum lycopersicum
  REGION 1..7: note = ACE-inhibitor; ACE inhibitory peptide; Shows angiotensin-I converting enzyme (ACE-I) inhibitory activity and DPPH activity. B. subtilis f
ASLLPPY

SEQ ID NO: 54 - protein, 10 aa, Juglans regia
  REGION 1..10: note = ACE-inhibitor; ACE inhibitory peptide; Shows the inhibitory mechanism of ACE-inhibitory peptide
ATAFQIPRED

SEQ ID NO: 55 - protein, 5 aa, Corylus heterophylla
  REGION 1..5: note = ACE-inhibitor; --NA--; Inhibit the ACE activity attributed to the formation of cation-pi interactions.
AVKVL

SEQ ID NO: 56 - protein, 6 aa, Phaseolus vulgaris
  REGION 1..6: note = ACE-inhibitor; ACE inhibitory peptide; "Having antidiabetic and antihypertensive potential regardless of their antioxidant capacity, i.e. "
CGPHGA

SEQ ID NO: 57 - protein, 9 aa, Solanum lycopersicum
  REGION 1..9: note = ACE-inhibitor; ACE inhibitory peptide; Shows angiotensin-I converting enzyme (ACE-I) inhibitory activity and DPPH activity. B. subtilis f
CIDGVVYYG

SEQ ID NO: 58 - protein, 5 aa, Solanum lycopersicum
  REGION 1..5: note = ACE-inhibitor; ACE inhibitory peptide; Shows angiotensin-I converting enzyme (ACE-I) inhibitory activity and DPPH activity. B. subtilis f
CPGLP

SEQ ID NO: 59 - protein, 8 aa, Solanum lycopersicum
  REGION 1..8: note = ACE-inhibitor; ACE inhibitory peptide; Shows angiotensin-I converting enzyme (ACE-I) inhibitory activity and DPPH activity. B. subtilis f
CPGLPIAN

SEQ ID NO: 60 - protein, 5 aa, Phaseolus vulgaris
  REGION 1..5: note = ACE-inhibitor; ACE inhibitory peptide; "Having antidiabetic and antihypertensive potential regardless of their antioxidant capacity, i.e. "
CPGNK

SEQ ID NO: 61 - protein, 6 aa, Solanum lycopersicum
  REGION 1..6: note = ACE-inhibitor; ACE inhibitory peptide; Shows angiotensin-I converting enzyme (ACE-I) inhibitory activity and DPPH activity. B. subtilis f
DGVVYY

SEQ ID NO: 62 - protein, 10 aa, Solanum lycopersicum
  REGION 1..10: note = ACE-inhibitor; ACE inhibitory peptide; Shows angiotensin-I converting enzyme (ACE-I) inhibitory activity and DPPH activity. B. subtilis f
DGVVYYGAQT

SEQ ID NO: 63 - protein, 7 aa, Hordeum vulgare
  REGION 1..7: note = ACE-inhibitor; Serpin-ZX; Shows angiotensin-I converting enzyme (ACE-I) inhibitory activity
DHPFLFL

SEQ ID NO: 64 - protein, 5 aa, Pisum sativum
  REGION 1..5: note = ACE-inhibitor; --NA--; Inhibits angiotensin I converting enzyme (ACE) activity.
DLKLP

SEQ ID NO: 65 - protein, 6 aa, Solanum lycopersicum
  REGION 1..6: note = ACE-inhibitor; ACE inhibitory peptide; Shows angiotensin-I converting enzyme (ACE-I) inhibitory activity and DPPH activity. B. subtilis f
DLPGLT

SEQ ID NO: 66 - protein, 9 aa, Solanum lycopersicum
  REGION 1..9: note = ACE-inhibitor; ACE inhibitory peptide; Shows angiotensin-I converting enzyme (ACE-I) inhibitory activity and DPPH activity. B. subtilis f
DLPGLTKVA

SEQ ID NO: 67 - protein, 5 aa, Solanum lycopersicum
  REGION 1..5: note = ACE-inhibitor; ACE inhibitory peptide; Shows angiotensin-I converting enzyme (ACE-I) inhibitory activity and DPPH activity. B. subtilis f
DPGLQ

SEQ ID NO: 68 - protein, 9 aa, Solanum lycopersicum
  REGION 1..9: note = ACE-inhibitor; ACE inhibitory peptide; Shows angiotensin-I converting enzyme (ACE-I) inhibitory activity and DPPH activity. B. subtilis f
DPGLQANTR

SEQ ID NO: 69 - protein, 10 aa, Solanum lycopersicum
  REGION 1..10: note = ACE-inhibitor; ACE inhibitory peptide; Shows angiotensin-I converting enzyme (ACE-I) inhibitory activity and DPPH activity. B. subtilis f
DPGLQANTRV

SEQ ID NO: 70 - protein, 6 aa, Hordeum vulgare
  REGION 1..6: note = ACE-inhibitor; Serine carboxypeptidase; Shows angiotensin-I converting enzyme (ACE-I) inhibitory activity
DSWRPW

SEQ ID NO: 71 - protein, 6 aa, Solanum lycopersicum
  REGION 1..6: note = ACE-inhibitor; ACE inhibitory peptide; Shows angiotensin-I converting enzyme (ACE-I) inhibitory activity and DPPH activity. B. subtilis f
DVPPYM

SEQ ID NO: 72 - protein, 5 aa, Triticum aestivum
  REGION 1..5: note = ACE-inhibitor; Bioactive peptides; Shows angiotensin-I converting enzyme (ACE-I) inhibition and antihypertensive activity
DYVPG

SEQ ID NO: 73 - protein, 7 aa, Solanum lycopersicum
  REGION 1..7: note = ACE-inhibitor; ACE inhibitory peptide; Shows angiotensin-I converting enzyme (ACE-I) inhibitory activity and DPPH activity. B. subtilis f
EIVPPAN

SEQ ID NO: 74 - protein, 10 aa, Solanum lycopersicum
  REGION 1..10: note = ACE-inhibitor; ACE inhibitory peptide; Shows angiotensin-I converting enzyme (ACE-I) inhibitory activity and DPPH activity. B. subtilis f
EIVPPANQLA

SEQ ID NO: 75 - protein, 9 aa, Solanum lycopersicum
  REGION 1..9: note = ACE-inhibitor; ACE inhibitory peptide; Shows angiotensin-I converting enzyme (ACE-I) inhibitory activity and DPPH activity. B. subtilis f
EIVPPATQL

SEQ ID NO: 76 - protein, 6 aa, Psophocarpus tetragonolobus
  REGION 1..6: note = ACE-inhibitor; ACE inhibitory peptide; Shows in vitro ACE inhibitory properties and in vivo blood pressure lowering efficacy in rat model
EPALVP

SEQ ID NO: 77 - protein, 10 aa, Juglans regia
  REGION 1..10: note = ACE-inhibitor; ACE inhibitory peptide; Shows the inhibitory mechanism of ACE-inhibitory peptide (IC50=233.178 micro-M)
EPNGLLLPQY

SEQ ID NO: 78 - protein, 5 aa, Solanum lycopersicum
  REGION 1..5: note = ACE-inhibitor; ACE inhibitory peptide; Shows angiotensin-I converting enzyme (ACE-I) inhibitory activity and DPPH activity. B. subtilis f
EPPLP

SEQ ID NO: 79 - protein, 6 aa, Solanum lycopersicum
  REGION 1..6: note = ACE-inhibitor; ACE inhibitory peptide; Shows angiotensin-I converting enzyme (ACE-I) inhibitory activity and DPPH activity. B. subtilis f
EPPLPP

SEQ ID NO: 80 - protein, 12 aa, Juglans regia
  REGION 1..12: note = ACE-inhibitor; ACE inhibitory peptide; Shows the inhibitory mechanism of ACE-inhibitory peptide
ESYFVPTERQSR

SEQ ID NO: 81 - protein, 5 aa, Glycine max
  REGION 1..5: note = ACE-inhibitor; Glycinin; It is used as an excellent source of ACE inhibitor
FAPEF

SEQ ID NO: 82 - protein, 9 aa, Solanum lycopersicum
  REGION 1..9: note = ACE-inhibitor; ACE inhibitory peptide; Shows angiotensin-I converting enzyme (ACE-I) inhibitory activity and DPPH activity. B. subtilis f
FASGVLVPK

SEQ ID NO: 83 - protein, 5 aa, Psophocarpus tetragonolobus
  REGION 1..5: note = ACE-inhibitor; --NA--; Shows ACE-inhibitory activity and antioxidant property. The winged bean seed (WBS) proteolysate ca
FDIRA

SEQ ID NO: 84 - protein, 7 aa, Hordeum vulgare
  REGION 1..7: note = ACE-inhibitor; ATP synthase subunit; Shows angiotensin-I converting enzyme (ACE-I) inhibitory activity
FIDNIFR

SEQ ID NO: 85 - protein, 7 aa, Juglans regia
  REGION 1..7: note = ACE-inhibitor; ACE inhibitory peptide; Shows the inhibitory mechanism of ACE-inhibitory peptide
FQIPRED

SEQ ID NO: 86 - protein, 6 aa, Hordeum vulgare
  REGION 1..6: note = ACE-inhibitor; Serpin-Z4; Shows angiotensin-I converting enzyme (ACE-I) inhibitory activity
FQLPKF

SEQ ID NO: 87 - protein, 10 aa, Maclura pomifera
  REGION 1..10: note = ACE-inhibitor; Bioactive peptides; Shows the highest inhibition of angiotensin-converting enzyme (ACE) and the presence of bioactive
FVAPFPEVFG

SEQ ID NO: 88 - protein, 7 aa, Coix lachryma
  REGION 1..7: note = ACE-inhibitor; ACE inhibitory peptide; "It has a significant antihypertensive effect, and is used as a good natural ingredient for pharmac"
GAAGGAF

SEQ ID NO: 89 - protein, 20 aa, Solanum lycopersicum
  REGION 1..20: note = ACE-inhibitor; ACE inhibitory peptide; Shows angiotensin-I converting enzyme (ACE-I) inhibitory activity and DPPH activity. B. subtilis f
GDEIVPPANQLAADNLENDG

SEQ ID NO: 90 - protein, 18 aa, Juglans regia
  REGION 1..18: note = ACE-inhibitor; ACE inhibitory peptide; Shows the inhibitory mechanism of ACE-inhibitory peptide
GEHGQQQRGLGNNVFSGF

SEQ ID NO: 91 - protein, 8 aa, Hordeum vulgare
  REGION 1..8: note = ACE-inhibitor; Protein disulfide-isomerase; Shows angiotensin-I converting enzyme (ACE-I) inhibitory activity
GFPTLKIF

SEQ ID NO: 92 - protein, 6 aa, Solanum lycopersicum
  REGION 1..6: note = ACE-inhibitor; ACE inhibitory peptide; Shows angiotensin-I converting enzyme (ACE-I) inhibitory activity and DPPH activity. B. subtilis f
GFYPPP

SEQ ID NO: 93 - protein, 6 aa, Phaseolus vulgaris
  REGION 1..6: note = ACE-inhibitor; ACE inhibitory peptide; "Having antidiabetic and antihypertensive potential regardless of their antioxidant capacity, i.e. "
GGDEAG

SEQ ID NO: 94 - protein, 6 aa, Phaseolus vulgaris
  REGION 1..6: note = ACE-inhibitor; ACE inhibitory peptide; "Having antidiabetic and antihypertensive potential regardless of their antioxidant capacity, i.e. "
GGGLHK

SEQ ID NO: 95 - protein, 6 aa, Phaseolus vulgaris
  REGION 1..6: note = ACE-inhibitor; ACE inhibitory peptide; "Having antidiabetic and antihypertensive potential regardless of their antioxidant capacity, i.e. "
GGNEGA

SEQ ID NO: 96 - protein, 6 aa, Pisum sativum
  REGION 1..6: note = ACE-inhibitor; --NA--; Inhibits angiotensin I converting enzyme (ACE) activity.
GGSGNY

SEQ ID NO: 97 - protein, 5 aa, Phaseolus vulgaris
  REGION 1..5: note = ACE-inhibitor; ACE inhibitory peptide; "Having antidiabetic and antihypertensive potential regardless of their antioxidant capacity, i.e. "
GHVPP

SEQ ID NO: 98 - protein, 7 aa, Hordeum vulgare
  REGION 1..7: note = ACE-inhibitor; Beta-amylase; Shows angiotensin-I converting enzyme (ACE-I) inhibitory activity
GIHWWYK

SEQ ID NO: 99 - protein, 5 aa, Solanum lycopersicum
  REGION 1..5: note = ACE-inhibitor; ACE inhibitory peptide; Shows angiotensin-I converting enzyme (ACE-I) inhibitory activity and DPPH activity. B. subtilis f
GKPLP

SEQ ID NO: 100 - protein, 6 aa, Solanum lycopersicum
  REGION 1..6: note = ACE-inhibitor; ACE inhibitory peptide; Shows angiotensin-I converting enzyme (ACE-I) inhibitory activity and DPPH activity. B. subtilis f
GPGLVT

SEQ ID NO: 101 - protein, 5 aa, Solanum lycopersicum
  REGION 1..5: note = ACE-inhibitor; ACE inhibitory peptide; Shows angiotensin-I converting enzyme (ACE-I) inhibitory activity and DPPH activity. B. subtilis f
GQVPP

SEQ ID NO: 102 - protein, 6 aa, Solanum lycopersicum
  REGION 1..6: note = ACE-inhibitor; ACE inhibitory peptide; Shows angiotensin-I converting enzyme (ACE-I) inhibitory activity and DPPH activity. B. subtilis f
GQVPPQ

SEQ ID NO: 103 - protein, 10 aa, Solanum lycopersicum
  REGION 1..10: note = ACE-inhibitor; ACE inhibitory peptide; Shows angiotensin-I converting enzyme (ACE-I) inhibitory activity and DPPH activity. B. subtilis f
GRRICPGLPI

SEQ ID NO: 104 - protein, 6 aa, Pisum sativum
  REGION 1..6: note = ACE-inhibitor; --NA--; Inhibits angiotensin I converting enzyme (ACE) activity.
GSSDNR

SEQ ID NO: 105 - protein, 8 aa, Hordeum vulgare
  REGION 1..8: note = ACE-inhibitor; Beta-amylase; Shows angiotensin-I converting enzyme (ACE-I) inhibitory activity
GVDNQPLF

SEQ ID NO: 106 - protein, 6 aa, Pisum sativum
  REGION 1..6: note = ACE-inhibitor; --NA--; Inhibits angiotensin I converting enzyme (ACE) activity.
HNTPSR

SEQ ID NO: 107 - protein, 5 aa, Solanum lycopersicum
  REGION 1..5: note = ACE-inhibitor; ACE inhibitory peptide; Shows angiotensin-I converting enzyme (ACE-I) inhibitory activity and DPPH activity. B. subtilis f
HPLPP

SEQ ID NO: 108 - protein, 10 aa, Solanum lycopersicum
  REGION 1..10: note = ACE-inhibitor; ACE inhibitory peptide; Shows angiotensin-I converting enzyme (ACE-I) inhibitory activity and DPPH activity. B. subtilis f
HTFSVDLPGL

SEQ ID NO: 109 - protein, 6 aa, Glycine max
  REGION 1..6: note = ACE-inhibitor; Glycinin; It is used as an excellent source of ACE inhibitor
IAVPTG

SEQ ID NO: 110 - protein, 6 aa, Solanum lycopersicum
  REGION 1..6: note = ACE-inhibitor; ACE inhibitory peptide; Shows angiotensin-I converting enzyme (ACE-I) inhibitory activity and DPPH activity. B. subtilis f
ICPGLP

SEQ ID NO: 111 - protein, 16 aa, Solanum lycopersicum
  REGION 1..16: note = ACE-inhibitor; ACE inhibitory peptide; Shows angiotensin-I converting enzyme (ACE-I) inhibitory activity and DPPH activity. B. subtilis f
ICPGLPIANQFIALLV

SEQ ID NO: 112 - protein, 11 aa, Solanum lycopersicum
  REGION 1..11: note = ACE-inhibitor; ACE inhibitory peptide; Shows angiotensin-I converting enzyme (ACE-I) inhibitory activity and DPPH activity. B. subtilis f
IDLPGLTKVAV

SEQ ID NO: 113 - protein, 5 aa, Prunus cerasus
  REGION 1..5: note = ACE-inhibitor; ACE inhibitory peptide; "Act as highly angiotensin-I-converting enzyme (ACE)-inhibitory peptides, and shows antihypertensiv"
IFSPR

SEQ ID NO: 114 - protein, 6 aa, Solanum lycopersicum
  REGION 1..6: note = ACE-inhibitor; ACE inhibitory peptide; Shows angiotensin-I converting enzyme (ACE-I) inhibitory activity and DPPH activity. B. subtilis f
IGQVPP

SEQ ID NO: 115 - protein, 11 aa, Solanum lycopersicum
  REGION 1..11: note = ACE-inhibitor; ACE inhibitory peptide; Shows angiotensin-I converting enzyme (ACE-I) inhibitory activity and DPPH activity. B. subtilis f
IHPLPPPVNSP

SEQ ID NO: 116 - protein, 9 aa, Maclura pomifera
  REGION 1..9: note = ACE-inhibitor; Bioactive peptides; Shows the highest inhibition of angiotensin-converting enzyme (ACE) and the presence of bioactive
IISQETYKQ

SEQ ID NO: 117 - protein, 5 aa, Cannabis sativa
  REGION 1..5: note = ACE-inhibitor; --NA--; Shows inhibitions of angiotensin converting enzyme and renin activities.
IPAGV

SEQ ID NO: 118 - protein, 9 aa, Juglans regia
  REGION 1..9: note = ACE-inhibitor; ACE inhibitory peptide; Shows the inhibitory mechanism of ACE-inhibitory peptide
IQLSAERLQ

SEQ ID NO: 119 - protein, 9 aa, Juglans regia
  REGION 1..9: note = ACE-inhibitor; ACE inhibitory peptide; Shows the inhibitory mechanism of ACE-inhibitory peptide
IRALPEEVL

SEQ ID NO: 120 - protein, 10 aa, Juglans regia
  REGION 1..10: note = ACE-inhibitor; ACE inhibitory peptide; Shows the inhibitory mechanism of ACE-inhibitory peptide
IRALPEEVLA

SEQ ID NO: 121 - protein, 12 aa, Juglans regia
  REGION 1..12: note = ACE-inhibitor; ACE inhibitory peptide; Shows the inhibitory mechanism of ACE-inhibitory peptide
IRALPEEVLANA

SEQ ID NO: 122 - protein, 18 aa, Juglans regia
  REGION 1..18: note = ACE-inhibitor; ACE inhibitory peptide; Shows the inhibitory mechanism of ACE-inhibitory peptide
ISLLDTNNNANQLDQNPR

SEQ ID NO: 123 - protein, 19 aa, Juglans regia
  REGION 1..19: note = ACE-inhibitor; ACE inhibitory peptide; Shows the inhibitory mechanism of ACE-inhibitory peptide
ISLLDTNNNANQLDQNPRN

SEQ ID NO: 124 - protein, 5 aa, Solanum lycopersicum
  REGION 1..5: note = ACE-inhibitor; ACE inhibitory peptide; Shows angiotensin-I converting enzyme (ACE-I) inhibitory activity and DPPH activity. B. subtilis f
IVEYF

SEQ ID NO: 125 - protein, 5 aa, Prunus cerasus
  REGION 1..5: note = ACE-inhibitor; ACE inhibitory peptide; "Act as highly angiotensin-I-converting enzyme (ACE)-inhibitory peptides, and shows antihypertensiv"
IYSPH

SEQ ID NO: 126 - protein, 5 aa, Prunus cerasus
  REGION 1..5: note = ACE-inhibitor; ACE inhibitory peptide; "Act as highly angiotensin-I-converting enzyme (ACE)-inhibitory peptides, and shows antihypertensiv"
IYTPH

SEQ ID NO: 127 - protein, 5 aa, Solanum lycopersicum
  REGION 1..5: note = ACE-inhibitor; ACE inhibitory peptide; Shows angiotensin-I converting enzyme (ACE-I) inhibitory activity and DPPH activity. B. subtilis f
KDVPP

SEQ ID NO: 128 - protein, 6 aa, Phaseolus vulgaris
  REGION 1..6: note = ACE-inhibitor; ACE inhibitory peptide; "Having antidiabetic and antihypertensive potential regardless of their antioxidant capacity, i.e. "
KGPASK

SEQ ID NO: 129 - protein, 10 aa, Brassica napus
  REGION 1..10: note = ACE-inhibitor; Bioactive peptides; Shows angiotensin-I converting enzyme (ACE-I) inhibition and antihypertensive activity
KKRSKKKSFG

SEQ ID NO: 130 - protein, 5 aa, Phaseolus vulgaris
  REGION 1..5: note = ACE-inhibitor; ACE inhibitory peptide; "Having antidiabetic and antihypertensive potential regardless of their antioxidant capacity, i.e. "
KKSSG

SEQ ID NO: 131 - protein, 7 aa, Hordeum vulgare
  REGION 1..7: note = ACE-inhibitor; Beta-amylase; Shows angiotensin-I converting enzyme (ACE-I) inhibitory activity
KLQPFPF

SEQ ID NO: 132 - protein, 6 aa, Phaseolus vulgaris
  REGION 1..6: note = ACE-inhibitor; ACE inhibitory peptide; "Having antidiabetic and antihypertensive potential regardless of their antioxidant capacity, i.e. "
KMARPV

SEQ ID NO: 133 - protein, 5 aa, Solanum lycopersicum
  REGION 1..5: note = ACE-inhibitor; ACE inhibitory peptide; Shows angiotensin-I converting enzyme (ACE-I) inhibitory activity and DPPH activity. B. subtilis f
KPGLP

SEQ ID NO: 134 - protein, 17 aa, Juglans regia
  REGION 1..17: note = ACE-inhibitor; ACE inhibitory peptide; Shows the inhibitory mechanism of ACE-inhibitory peptide
KTNENAMVSPLAGRTSA

SEQ ID NO: 135 - protein, 14 aa, Juglans regia
  REGION 1..14: note = ACE-inhibitor; ACE inhibitory peptide; Shows the inhibitory mechanism of ACE-inhibitory peptide
KTPGLPPMPQSDYL

SEQ ID NO: 136 - protein, 5 aa, Phaseolus vulgaris
  REGION 1..5: note = ACE-inhibitor; ACE inhibitory peptide; "Having antidiabetic and antihypertensive potential regardless of their antioxidant capacity, i.e. "
KTYGL

SEQ ID NO: 137 - protein, 9 aa, Solanum lycopersicum
  REGION 1..9: note = ACE-inhibitor; ACE inhibitory peptide; Shows angiotensin-I converting enzyme (ACE-I) inhibitory activity and DPPH activity. B. subtilis f
KVPPKGKGT

SEQ ID NO: 138 - protein, 5 aa, Phaseolus vulgaris
  REGION 1..5: note = ACE-inhibitor; ACE inhibitory peptide; "Having antidiabetic and antihypertensive potential regardless of their antioxidant capacity, i.e. "
KYMKS

SEQ ID NO: 139 - protein, 9 aa, Maclura pomifera
  REGION 1..9: note = ACE-inhibitor; Bioactive peptides; Shows the highest inhibition of angiotensin-converting enzyme (ACE) and the presence of bioactive
KYPVEPFTE

SEQ ID NO: 140 - protein, 13 aa, Juglans regia
  REGION 1..13: note = ACE-inhibitor; ACE inhibitory peptide; Shows the inhibitory mechanism of ACE-inhibitory peptide
LADAFNVDTETAR

SEQ ID NO: 141 - protein, 14 aa, Juglans regia
  REGION 1..14: note = ACE-inhibitor; ACE inhibitory peptide; Shows the inhibitory mechanism of ACE-inhibitory peptide
LADAFNVDTETARR

SEQ ID NO: 142 - protein, 5 aa, Glycine max
  REGION 1..5: note = ACE-inhibitor; Glycinin; It is used as an excellent source of ACE inhibitor
LDFPA

SEQ ID NO: 143 - protein, 5 aa, Solanum lycopersicum
  REGION 1..5: note = ACE-inhibitor; ACE inhibitory peptide; Shows angiotensin-I converting enzyme (ACE-I) inhibitory activity and DPPH activity. B. subtilis f
LDPGL

SEQ ID NO: 144 - protein, 15 aa, Juglans regia
  REGION 1..15: note = ACE-inhibitor; ACE inhibitory peptide; Shows the inhibitory mechanism of ACE-inhibitory peptide
LDTNNNANQLDQNPR

SEQ ID NO: 145 - protein, 16 aa, Juglans regia
  REGION 1..16: note = ACE-inhibitor; ACE inhibitory peptide; Shows the inhibitory mechanism of ACE-inhibitory peptide
LDTNNNANQLDQNPRN

SEQ ID NO: 146 - protein, 17 aa, Juglans regia
  REGION 1..17: note = ACE-inhibitor; ACE inhibitory peptide; Shows the inhibitory mechanism of ACE-inhibitory peptide
LDTNNNANQLDQNPRNF

SEQ ID NO: 147 - protein, 5 aa, Glycine max
  REGION 1..5: note = ACE-inhibitor; Bioactive peptides; Shows angiotensin-I converting enzyme (ACE-I) inhibition and antihypertensive activity
LIVTQ

SEQ ID NO: 148 - protein, 9 aa, Solanum lycopersicum
  REGION 1..9: note = ACE-inhibitor; ACE inhibitory peptide; Shows angiotensin-I converting enzyme (ACE-I) inhibitory activity and DPPH activity. B. subtilis f
LKVPPKGKG

SEQ ID NO: 149 - protein, 9 aa, Maclura pomifera
  REGION 1..9: note = ACE-inhibitor; Bioactive peptides; Shows the highest inhibition of angiotensin-converting enzyme (ACE) and the presence of bioactive
LLRFFVAPF

SEQ ID NO: 150 - protein, 15 aa, Lens culinaris
  REGION 1..15: note = ACE-inhibitor; ACE inhibitory peptide; Shows dual antioxidant/antihypertensive activity and useful in food industry such as the applicati
LLSGTQNQPSFLSGF

SEQ ID NO: 151 - protein, 10 aa, Juglans regia
  REGION 1..10: note = ACE-inhibitor; ACE inhibitory peptide; Shows the inhibitory mechanism of ACE-inhibitory peptide
LQLSAERGAL

SEQ ID NO: 152 - protein, 10 aa, Juglans regia
  REGION 1..10: note = ACE-inhibitor; ACE inhibitory peptide; Shows the inhibitory mechanism of ACE-inhibitory peptide
LQLSALADRA

SEQ ID NO: 153 - protein, 7 aa, Juglans regia
  REGION 1..7: note = ACE-inhibitor; ACE inhibitory peptide; Shows the inhibitory mechanism of ACE-inhibitory peptide
LRGIENY

SEQ ID NO: 154 - protein, 12 aa, Solanum lycopersicum
  REGION 1..12: note = ACE-inhibitor; ACE inhibitory peptide; Shows angiotensin-I converting enzyme (ACE-I) inhibitory activity and DPPH activity. B. subtilis f
LRLKPGLPKNDG

SEQ ID NO: 155 - protein, 7 aa, Juglans regia
  REGION 1..7: note = ACE-inhibitor; ACE inhibitory peptide; Shows the inhibitory mechanism of ACE-inhibitory peptide
LRVFSND

SEQ ID NO: 156 - protein, 9 aa, Juglans regia
  REGION 1..9: note = ACE-inhibitor; ACE inhibitory peptide; Shows the inhibitory mechanism of ACE-inhibitory peptide
LRVFSNDIL

SEQ ID NO: 157 - protein, 5 aa, Glycine max
  REGION 1..5: note = ACE-inhibitor; Glycinin; It is used as an excellent source of ACE inhibitor
LSAQY

SEQ ID NO: 158 - protein, 5 aa, Phaseolus vulgaris
  REGION 1..5: note = ACE-inhibitor; ACE inhibitory peptide; "Having antidiabetic and antihypertensive potential regardless of their antioxidant capacity, i.e. "
LSFNT

SEQ ID NO: 159 - protein, 5 aa, Phaseolus vulgaris
  REGION 1..5: note = ACE-inhibitor; ACE inhibitory peptide; "Having antidiabetic and antihypertensive potential regardless of their antioxidant capacity, i.e. "
LSGVF

SEQ ID NO: 160 - protein, 7 aa, Juglans regia
  REGION 1..7: note = ACE-inhibitor; ACE inhibitory peptide; Shows the inhibitory mechanism of ACE-inhibitory peptide
LTIPQNF

SEQ ID NO: 161 - protein, 11 aa, Solanum lycopersicum
  REGION 1..11: note = ACE-inhibitor; ACE inhibitory peptide; Shows angiotensin-I converting enzyme (ACE-I) inhibitory activity and DPPH activity. B. subtilis f
LVALGVPHHIA

SEQ ID NO: 162 - protein, 17 aa, Juglans regia
  REGION 1..17: note = ACE-inhibitor; ACE inhibitory peptide; Shows the inhibitory mechanism of ACE-inhibitory peptide
MDTTNNANQLDQNPRNF

SEQ ID NO: 163 - protein, 5 aa, Phaseolus vulgaris
  REGION 1..5: note = ACE-inhibitor; ACE inhibitory peptide; "Having antidiabetic and antihypertensive potential regardless of their antioxidant capacity, i.e. "
MPHLK

SEQ ID NO: 164 - protein, 5 aa, Pisum sativum
  REGION 1..5: note = ACE-inhibitor; --NA--; Inhibits angiotensin I converting enzyme (ACE) activity.
MRDLK

SEQ ID NO: 165 - protein, 6 aa, Psophocarpus tetragonolobus
  REGION 1..6: note = ACE-inhibitor; ACE inhibitory peptide; Shows in vitro ACE inhibitory properties and in vivo blood pressure lowering efficacy in rat model
MRSVVT

SEQ ID NO: 166 - protein, 6 aa, Hordeum vulgare
  REGION 1..6: note = ACE-inhibitor; UTP-glucose-1-phosphate uridylyltransferase; Shows angiotensin-I converting enzyme (ACE-I) inhibitory activity
NFLARF

SEQ ID NO: 167 - protein, 16 aa, Maclura pomifera
  REGION 1..16: note = ACE-inhibitor; Bioactive peptides; Shows the highest inhibition of angiotensin-converting enzyme (ACE) and the presence of bioactive
NLLRFFVAPFPEVFGK

SEQ ID NO: 168 - protein, 5 aa, Phaseolus vulgaris
  REGION 1..5: note = ACE-inhibitor; ACE inhibitory peptide; "Having antidiabetic and antihypertensive potential regardless of their antioxidant capacity, i.e. "
NPSLP

SEQ ID NO: 169 - protein, 11 aa, Lens culinaris
  REGION 1..11: note = ACE-inhibitor; ACE inhibitory peptide; Shows dual antioxidant/antihypertensive activity and useful in food industry such as the applicati
NSLTLPILRYL

SEQ ID NO: 170 - protein, 18 aa, Juglans regia
  REGION 1..18: note = ACE-inhibitor; ACE inhibitory peptide; Shows the inhibitory mechanism of ACE-inhibitory peptide
PAGVAHWSYNDGSNPVVA

SEQ ID NO: 171 - protein, 9 aa, Solanum lycopersicum
  REGION 1..9: note = ACE-inhibitor; ACE inhibitory peptide; Shows angiotensin-I converting enzyme (ACE-I) inhibitory activity and DPPH activity. B. subtilis f
PAIGPHHLG

SEQ ID NO: 172 - protein, 10 aa, Maclura pomifera
  REGION 1..10: note = ACE-inhibitor; Bioactive peptides; Shows the highest inhibition of angiotensin-converting enzyme (ACE) and the presence of bioactive
PEVIESPPEI

SEQ ID NO: 173 - protein, 5 aa, Solanum lycopersicum
  REGION 1..5: note = ACE-inhibitor; ACE inhibitory peptide; Shows angiotensin-I converting enzyme (ACE-I) inhibitory activity and DPPH activity. B. subtilis f
PGLPK

SEQ ID NO: 174 - protein, 6 aa, Solanum lycopersicum
  REGION 1..6: note = ACE-inhibitor; ACE inhibitory peptide; Shows angiotensin-I converting enzyme (ACE-I) inhibitory activity and DPPH activity. B. subtilis f
PGLPKK

SEQ ID NO: 175 - protein, 8 aa, Solanum lycopersicum
  REGION 1..8: note = ACE-inhibitor; ACE inhibitory peptide; Shows angiotensin-I converting enzyme (ACE-I) inhibitory activity and DPPH activity. B. subtilis f
PGLPKKDG

SEQ ID NO: 176 - protein, 6 aa, Solanum lycopersicum
  REGION 1..6: note = ACE-inhibitor; ACE inhibitory peptide; Shows angiotensin-I converting enzyme (ACE-I) inhibitory activity and DPPH activity. B. subtilis f
PGLQAN

SEQ ID NO: 177 - protein, 6 aa, Solanum lycopersicum
  REGION 1..6: note = ACE-inhibitor; ACE inhibitory peptide; Shows angiotensin-I converting enzyme (ACE-I) inhibitory activity and DPPH activity. B. subtilis f
PGVPWP

SEQ ID NO: 178 - protein, 5 aa, Solanum lycopersicum
  REGION 1..5: note = ACE-inhibitor; ACE inhibitory peptide; Shows angiotensin-I converting enzyme (ACE-I) inhibitory activity and DPPH activity. B. subtilis f
PHHIA

SEQ ID NO: 179 - protein, 10 aa, Maclura pomifera
  REGION 1..10: note = ACE-inhibitor; Bioactive peptides; Shows the highest inhibition of angiotensin-converting enzyme (ACE) and the presence of bioactive
PHLSFMAIPP

SEQ ID NO: 180 - protein, 8 aa, Solanum lycopersicum
  REGION 1..8: note = ACE-inhibitor; ACE inhibitory peptide; Shows angiotensin-I converting enzyme (ACE-I) inhibitory activity and DPPH activity. B. subtilis f
PKLPPVKK

SEQ ID NO: 181 - protein, 9 aa, Solanum lycopersicum
  REGION 1..9: note = ACE-inhibitor; ACE inhibitory peptide; Shows angiotensin-I converting enzyme (ACE-I) inhibitory activity and DPPH activity. B. subtilis f
PLPPPVNSP

SEQ ID NO: 182 - protein, 7 aa, Hordeum vulgare
  REGION 1..7: note = ACE-inhibitor; Beta-amylase; Shows angiotensin-I converting enzyme (ACE-I) inhibitory activity
PMAPLPR

SEQ ID NO: 183 - protein, 9 aa, Solanum lycopersicum
  REGION 1..9: note = ACE-inhibitor; ACE inhibitory peptide; Shows angiotensin-I converting enzyme (ACE-I) inhibitory activity and DPPH activity. B. subtilis f
PNARGPGLV

SEQ ID NO: 184 - protein, 8 aa, Hordeum vulgare
  REGION 1..8: note = ACE-inhibitor; Serpin-Z7; Shows angiotensin-I converting enzyme (ACE-I) inhibitory activity
QFMLPKFK

SEQ ID NO: 185 - protein, 8 aa, Solanum lycopersicum
  REGION 1..8: note = ACE-inhibitor; ACE inhibitory peptide; Shows angiotensin-I converting enzyme (ACE-I) inhibitory activity and DPPH activity. B. subtilis f
QVPPQLLG

SEQ ID NO: 186 - protein, 9 aa, Maclura pomifera
  REGION 1..9: note = ACE-inhibitor; Bioactive peptides; Shows the highest inhibition of angiotensin-converting enzyme (ACE) and the presence of bioactive
RFFVAPFPE

SEQ ID NO: 187 - protein, 8 aa, Psophocarpus tetragonolobus
  REGION 1..8: note = ACE-inhibitor; ACE inhibitory peptide; Shows in vitro ACE inhibitory properties and in vivo blood pressure lowering efficacy in rat model
RGVFPCLK

SEQ ID NO: 188 - protein, 9 aa, Solanum lycopersicum
  REGION 1..9: note = ACE-inhibitor; ACE inhibitory peptide; Shows angiotensin-I converting enzyme (ACE-I) inhibitory activity and DPPH activity. B. subtilis f
RLRLKPGLP

SEQ ID NO: 189 - protein, 5 aa, Solanum lycopersicum
  REGION 1..5: note = ACE-inhibitor; ACE inhibitory peptide; Shows angiotensin-I converting enzyme (ACE-I) inhibitory activity and DPPH activity. B. subtilis f
RPGLP

SEQ ID NO: 190 - protein, 12 aa, Solanum lycopersicum
  REGION 1..12: note = ACE-inhibitor; ACE inhibitory peptide; Shows angiotensin-I converting enzyme (ACE-I) inhibitory activity and DPPH activity. B. subtilis f
RPGLPKKDGNID

SEQ ID NO: 191 - protein, 5 aa, Phaseolus vulgaris
  REGION 1..5: note = ACE-inhibitor; ACE inhibitory peptide; "Having antidiabetic and antihypertensive potential regardless of their antioxidant capacity, i.e. "
RTLNL

SEQ ID NO: 192 - protein, 8 aa, Juglans regia
  REGION 1..8: note = ACE-inhibitor; ACE inhibitory peptide; Shows the inhibitory mechanism of ACE-inhibitory peptide
RVFSNDIL

SEQ ID NO: 193 - protein, 12 aa, Solanum lycopersicum
  REGION 1..12: note = ACE-inhibitor; ACE inhibitory peptide; Shows angiotensin-I converting enzyme (ACE-I) inhibitory activity and DPPH activity. B. subtilis f
SAAAPAIGPHHL

SEQ ID NO: 194 - protein, 7 aa, Juglans regia
  REGION 1..7: note = ACE-inhibitor; ACE inhibitory peptide; Shows the inhibitory mechanism of ACE-inhibitory peptide
SAERGAL

SEQ ID NO: 195 - protein, 11 aa, Juglans regia
  REGION 1..11: note = ACE-inhibitor; ACE inhibitory peptide; Shows the inhibitory mechanism of ACE-inhibitory peptide
SAERGALYSDA

SEQ ID NO: 196 - protein, 15 aa, Maclura pomifera
  REGION 1..15: note = ACE-inhibitor; Bioactive peptides; Shows the highest inhibition of angiotensin-converting enzyme (ACE) and the presence of bioactive
SERYLGYLEQLLRLK

SEQ ID NO: 197 - protein, 9 aa, Hordeum vulgare
  REGION 1..9: note = ACE-inhibitor; Beta-amylase; Shows angiotensin-I converting enzyme (ACE-I) inhibitory activity
SGPPEHKLF

SEQ ID NO: 198 - protein, 5 aa, Phaseolus vulgaris
  REGION 1..5: note = ACE-inhibitor; ACE inhibitory peptide; "Having antidiabetic and antihypertensive potential regardless of their antioxidant capacity, i.e. "
SGSYS

SEQ ID NO: 199 - protein, 8 aa, Solanum lycopersicum
  REGION 1..8: note = ACE-inhibitor; ACE inhibitory peptide; Shows angiotensin-I converting enzyme (ACE-I) inhibitory activity and DPPH activity. B. subtilis f
SHYFYQCY

SEQ ID NO: 200 - protein, 16 aa, Brassica napus
  REGION 1..16: note = ACE-inhibitor; Bioactive peptides; Shows angiotensin-I converting enzyme (ACE-I) inhibition and antihypertensive activity
SLVSPSAAAAAAPGGS

SEQ ID NO: 201 - protein, 14 aa, Solanum lycopersicum
  REGION 1..14: note = ACE-inhibitor; ACE inhibitory peptide; Shows angiotensin-I converting enzyme (ACE-I) inhibitory activity and DPPH activity. B. subtilis f
SPDSHTFSVDLPGL

SEQ ID NO: 202 - protein, 5 aa, Phaseolus vulgaris
  REGION 1..5: note = ACE-inhibitor; ACE inhibitory peptide; "Having antidiabetic and antihypertensive potential regardless of their antioxidant capacity, i.e. "
TACKD

SEQ ID NO: 203 - protein, 14 aa, Lens culinaris
  REGION 1..14: note = ACE-inhibitor; ACE inhibitory peptide; Shows dual antioxidant/antihypertensive activity and useful in food industry such as the applicati
TLEPNSVFLPVLLH

SEQ ID NO: 204 - protein, 5 aa, Glycine max
  REGION 1..5: note = ACE-inhibitor; Glycinin; It is used as an excellent source of ACE inhibitor
TLPAL

SEQ ID NO: 205 - protein, 5 aa, Corylus heterophylla
  REGION 1..5: note = ACE-inhibitor; --NA--; Inhibit the ACE activity attributed to the formation of cation-pi interactions.
TLVGR

SEQ ID NO: 206 - protein, 8 aa, Psophocarpus tetragonolobus
  REGION 1..8: note = ACE-inhibitor; ACE inhibitory peptide; Shows in vitro ACE inhibitory properties and in vivo blood pressure lowering efficacy in rat model
TQLDLPTQ

SEQ ID NO: 207 - protein, 13 aa, Solanum lycopersicum
  REGION 1..13: note = ACE-inhibitor; ACE inhibitory peptide; Shows angiotensin-I converting enzyme (ACE-I) inhibitory activity and DPPH activity. B. subtilis f
TRKDVPPYMIPVQ

SEQ ID NO: 208 - protein, 8 aa, Solanum lycopersicum
  REGION 1..8: note = ACE-inhibitor; ACE inhibitory peptide; Shows angiotensin-I converting enzyme (ACE-I) inhibitory activity and DPPH activity. B. subtilis f
VALGVPHH

SEQ ID NO: 209 - protein, 19 aa, Juglans regia
  REGION 1..19: note = ACE-inhibitor; ACE inhibitory peptide; Shows the inhibitory mechanism of ACE-inhibitory peptide
VALMDTTNNANQLDQNPRN

SEQ ID NO: 210 - protein, 20 aa, Juglans regia
  REGION 1..20: note = ACE-inhibitor; ACE inhibitory peptide; Shows the inhibitory mechanism of ACE-inhibitory peptide
VALMDTTNNANQLDQNPRNF

SEQ ID NO: 211 - protein, 6 aa, Solanum lycopersicum
  REGION 1..6: note = ACE-inhibitor; ACE inhibitory peptide; Shows angiotensin-I converting enzyme (ACE-I) inhibitory activity and DPPH activity. B. subtilis f
VDLPGL

SEQ ID NO: 212 - protein, 7 aa, Solanum lycopersicum
  REGION 1..7: note = ACE-inhibitor; ACE inhibitory peptide; Shows angiotensin-I converting enzyme (ACE-I) inhibitory activity and DPPH activity. B. subtilis f
VDLPGLR

SEQ ID NO: 213 - protein, 5 aa, Phaseolus vulgaris
  REGION 1..5: note = ACE-inhibitor; ACE inhibitory peptide; "Having antidiabetic and antihypertensive potential regardless of their antioxidant capacity, i.e. "
VGTNK

SEQ ID NO: 214 - protein, 5 aa, Phaseolus vulgaris
  REGION 1..5: note = ACE-inhibitor; ACE inhibitory peptide; "Having antidiabetic and antihypertensive potential regardless of their antioxidant capacity, i.e. "
VKFMT

SEQ ID NO: 215 - protein, 5 aa, Solanum lycopersicum
  REGION 1..5: note = ACE-inhibitor; ACE inhibitory peptide; Shows angiotensin-I converting enzyme (ACE-I) inhibitory activity and DPPH activity. B. subtilis f
VLVPK

SEQ ID NO: 216 - protein, 10 aa, Maclura pomifera
  REGION 1..10: note = ACE-inhibitor; Bioactive peptides; Shows the highest inhibition of angiotensin-converting enzyme (ACE) and the presence of bioactive
VPGEIVESLS

SEQ ID NO: 217 - protein, 5 aa, Solanum lycopersicum
  REGION 1..5: note = ACE-inhibitor; ACE inhibitory peptide; Shows angiotensin-I converting enzyme (ACE-I) inhibitory activity and DPPH activity. B. subtilis f
VPHHI

SEQ ID NO: 218 - protein, 13 aa, Hordeum vulgare
  REGION 1..13: note = ACE-inhibitor; Subtilisin-chymotrypsin inhibitor; Shows angiotensin-I converting enzyme (ACE-I) inhibitory activity
VPLDFNPNRIFIL

SEQ ID NO: 219 - protein, 5 aa, Solanum lycopersicum
  REGION 1..5: note = ACE-inhibitor; ACE inhibitory peptide; Shows angiotensin-I converting enzyme (ACE-I) inhibitory activity and DPPH activity. B. subtilis f
VPPAN

SEQ ID NO: 220 - protein, 5 aa, Solanum lycopersicum
  REGION 1..5: note = ACE-inhibitor; ACE inhibitory peptide; Shows angiotensin-I converting enzyme (ACE-I) inhibitory activity and DPPH activity. B. subtilis f
VPPKG

SEQ ID NO: 221 - protein, 7 aa, Solanum lycopersicum
  REGION 1..7: note = ACE-inhibitor; ACE inhibitory peptide; Shows angiotensin-I converting enzyme (ACE-I) inhibitory activity and DPPH activity. B. subtilis f
VPPLYPN

SEQ ID NO: 222 - protein, 11 aa, Solanum lycopersicum
  REGION 1..11: note = ACE-inhibitor; ACE inhibitory peptide; Shows angiotensin-I converting enzyme (ACE-I) inhibitory activity and DPPH activity. B. subtilis f
VPPQLLGHYQH

SEQ ID NO: 223 - protein, 22 aa, Juglans regia
  REGION 1..22: note = ACE-inhibitor; ACE inhibitory peptide; Shows the inhibitory mechanism of ACE-inhibitory peptide
VVRRTIEPNGLLLPQYSNAPQL

SEQ ID NO: 224 - protein, 23 aa, Juglans regia
  REGION 1..23: note = ACE-inhibitor; ACE inhibitory peptide; Shows the inhibitory mechanism of ACE-inhibitory peptide
VVRRTIEPNGLLLPQYSNAPQLL

SEQ ID NO: 225 - protein, 8 aa, Cajanus cajan
  REGION 1..8: note = ACE-inhibitor; --NA--; the inhibitory property of the peptide against ACE can be used as a therapeutic strategy towards h
VVSLSIPR

SEQ ID NO: 226 - protein, 5 aa, Hordeum vulgare
  REGION 1..5: note = ACE-inhibitor; Aldose reductase; Shows angiotensin-I converting enzyme (ACE-I) inhibitory activity
WPFRL

SEQ ID NO: 227 - protein, 5 aa, Solanum lycopersicum
  REGION 1..5: note = ACE-inhibitor; ACE inhibitory peptide; Shows angiotensin-I converting enzyme (ACE-I) inhibitory activity and DPPH activity. B. subtilis f
YFYQC

SEQ ID NO: 228 - protein, 5 aa, Phaseolus vulgaris
  REGION 1..5: note = ACE-inhibitor; Bioactive peptides; "Precooked Bioactive sequences (YG,GA,AG.GS) precooked beans could contribute to the intake of bioa"
YGAGS

SEQ ID NO: 229 - protein, 6 aa, Psophocarpus tetragonolobus
  REGION 1..6: note = ACE-inhibitor; --NA--; Shows ACE-inhibitory activity and antioxidant property. The winged bean seed (WBS) proteolysate ca
YPNQKV

SEQ ID NO: 230 - protein, 17 aa, Maclura pomifera
  REGION 1..17: note = ACE-inhibitor; Bioactive peptides; Shows the highest inhibition of angiotensin-converting enzyme (ACE) and the presence of bioactive
YQEPVLGPVRGPFPIIV

SEQ ID NO: 231 - protein, 7 aa, Juglans regia
  REGION 1..7: note = ACE-inhibitor; Bioactive peptides; Shows angiotensin-I converting enzyme (ACE-I) inhibition and antihypertensive activity
YVPHWDL

SEQ ID NO: 232 - protein, 9 aa, Maclura pomifera
  REGION 1..9: note = ACE-inhibitor; Bioactive peptides; Shows the highest inhibition of angiotensin-converting enzyme (ACE) and the presence of bioactive
YYQQKPVAL

SEQ ID NO: 233 - protein, 5 aa, Linum usitatissimum
  REGION 1..5: note = ACE-inhibitor; --NA--; Shows angiotensin-I converting enzyme (ACE-I) inhibitory activity
WNINA

SEQ ID NO: 234 - protein, 5 aa, Linum usitatissimum
  REGION 1..5: note = ACE-inhibitor; --NA--; Shows angiotensin-I converting enzyme (ACE-I) inhibitory activity
WNLNA

SEQ ID NO: 235 - protein, 5 aa, Phaseolus vulgaris
  REGION 1..5: note = ACE-inhibitor; Bioactive peptides; "Precooked Bioactive sequences (SG,GG, EG, SF) precooked beans could contribute to the intake of bi"
EGGSF

SEQ ID NO: 236 - protein, 5 aa, Phaseolus vulgaris
  REGION 1..5: note = ACE-inhibitor; Bioactive peptides; "Raw Bioactive sequences (GT, TG, FA) Potential bioactivities of hydrolysates, including antioxidan"
FATGT

SEQ ID NO: 237 - protein, 6 aa, Phaseolus vulgaris
  REGION 1..6: note = ACE-inhibitor; Bioactive peptides; Precooked Bioactive sequences (SG) precooked beans could contribute to the intake of bioactive pep
FFECSG

SEQ ID NO: 238 - protein, 13 aa, Pisum sativum
  REGION 1..13: note = ACE-inhibitor; --NA--; ACE-inhibitory peptides maintain the gastrointestinal stability and reach the cardiovascular syste
KEDDEEEEQGEEE

SEQ ID NO: 239 - protein, 8 aa, Phaseolus vulgaris
  REGION 1..8: note = ACE-inhibitor; Bioactive peptides; "Precooked Bioactive sequences (RL,KL, RR, LO, LLL) precooked beans could contribute to the intake "
KLLLRRLQ

SEQ ID NO: 240 - protein, 5 aa, Phaseolus vulgaris
  REGION 1..5: note = ACE-inhibitor; Bioactive peptides; "Precooked Bioactive sequences (LAP,AP,LA,PG,PP) precooked beans could contribute to the intake of "
LAPPG

SEQ ID NO: 241 - protein, 15 aa, Phaseolus vulgaris
  REGION 1..15: note = ACE-inhibitor; Bioactive peptides; "Precooked Bioactive sequences (RR,EK,KE,LL) precooked beans could contribute to the intake of bioa"
LSERRMLLRKEKQAQ

SEQ ID NO: 242 - protein, 5 aa, Triticum aestivum
  REGION 1..5: note = ACE-inhibitor; ACE inhibitory peptide; Used as ACE- inhibitory peptide
NPPSV

SEQ ID NO: 243 - protein, 8 aa, Phaseolus vulgaris
  REGION 1..8: note = ACE-inhibitor; Bioactive peptides; "BPs were used as angiotensin converting enzyme inhibitory, antioxidant, cancer preventing, and oth"
PVNNPQIH

SEQ ID NO: 244 - protein, 9 aa, Phaseolus vulgaris
  REGION 1..9: note = ACE-inhibitor; Bioactive peptides; "Raw Bioactive sequences (RL, RR, LL) Potential bioactivities of hydrolysates, including antioxidan"
QQRRLLRRK

SEQ ID NO: 245 - protein, 8 aa, Phaseolus vulgaris
  REGION 1..8: note = ACE-inhibitor; Bioactive peptides; "Precooked Bioactive sequences (YL, EU, LV, LL, VA) precooked beans could contribute to the intake "
REYLLVAQ

SEQ ID NO: 246 - protein, 6 aa, Phaseolus vulgaris
  REGION 1..6: note = ACE-inhibitor; Bioactive peptides; "Raw Bioactive sequences (KR, RA, AA) Potential bioactivities of hydrolysates, including antioxidan"
RKRAAQ

SEQ ID NO: 247 - protein, 8 aa, Phaseolus vulgaris
  REGION 1..8: note = ACE-inhibitor; Bioactive peptides; "Precooked Bioactive sequences (RL,LKL,KL,LL) precooked beans could contribute to the intake of bio"
RLLLKLRQ

SEQ ID NO: 248 - protein, 15 aa, Phaseolus vulgaris
  REGION 1..15: note = ACE-inhibitor; Bioactive peptides; "Raw Bioactive sequences (GA,AG,GR,MG,LG) Potential bioactivities of hydrolysates, including antiox"
RNEQMGAGRLGRLRK

SEQ ID NO: 249 - protein, 12 aa, Phaseolus vulgaris
  REGION 1..12: note = ACE-inhibitor; Bioactive peptides; "Precooked Bioactive sequences (RA,GE,RR,AR) precooked beans could contribute to the intake of bioa"
RRARGERMSRRK

SEQ ID NO: 250 - protein, 12 aa, Phaseolus vulgaris
  REGION 1..12: note = ACE-inhibitor; Bioactive peptides; "Raw Bioactive sequences (RR, KD) Potential bioactivities of hydrolysates, including antioxidant ca"
RRQRRRRMRKDK

SEQ ID NO: 251 - protein, 5 aa, Phaseolus vulgaris
  REGION 1..5: note = ACE-inhibitor; Bioactive peptides; "Raw Bioactive sequences (SY, GA,AG,SG) Potential bioactivities of hydrolysates, including antioxid"
SGAGY

SEQ ID NO: 252 - protein, 5 aa, Phaseolus vulgaris
  REGION 1..5: note = ACE-inhibitor; Bioactive peptides; "Raw Bioactive sequences (YA, AA) Potential bioactivities of hydrolysates, including antioxidant ca"
YAAAT

SEQ ID NO: 253 - protein, 5 aa, Phaseolus vulgaris
  REGION 1..5: note = ACE-inhibitor; Bioactive peptides; "Raw Bioactive sequences (YA,AG,GS,GG) Potential bioactivities of hydrolysates, including antioxida"
YAGGS

SEQ ID NO: 254 - protein, 6 aa, Triticum aestivum
  REGION 1..6: note = ACE-inhibitor; Bioactive peptides; Shows angiotensin-I converting enzyme (ACE-I) inhibition and antihypertensive activity(IC50=1.7 mi
GGVIPN

SEQ ID NO: 255 - protein, 5 aa, Triticum aestivum
  REGION 1..5: note = ACE-inhibitor; Bioactive peptides; Shows angiotensin-I converting enzyme (ACE-I) inhibition and antihypertensive activity
TVVPG

SEQ ID NO: 256 - protein, 27 aa, Arachis hypogaea
  REGION 1..27: note = "ACE-inhibitor, Antihypertensive"; Arachin; Shows ACE-inhibitory and antihypertensive activity. It behave as transition state analog inhibitor
GIEEGIRGASVKSNDGYNEQADIYXPQ

SEQ ID NO: 257 - protein, 19 aa, Arachis hypogaea
  REGION 1..19: note = "ACE-inhibitor, Antihypertensive"; Arachin; Shows ACE-inhibitory and antihypertensive activity. It behave as transition state analog inhibitor
ISFYQHPEENAAQFQYLNA

SEQ ID NO: 258 - protein, 21 aa, Arachis hypogaea
  REGION 1..21: note = "ACE-inhibitor, Antihypertensive"; Arachin; Shows ACE-inhibitory and antihypertensive activity. It behave as transition state analog inhibitor
ISFYQQPEENACQQQYLNAQQ

SEQ ID NO: 259 - protein, 6 aa, Arachis hypogaea
  REGION 1..6: note = "ACE-inhibitor, Antihypertensive"; peanut protein family; It acts as a competitive inhibitor and show significant short term (12 h) and long term (28 days)
KLWMRP

SEQ ID NO: 260 - protein, 5 aa, Prunus dulcis
  REGION 1..5: note = Prunus dulcis, Prunus amygdalus; "ACE-inhibitor, Antihypertensive"; --NA--; Used as potent ACE inhibitory peptides which significantly regulate the release of nitric oxide an
MHTDD

SEQ ID NO: 261 - protein, 5 aa, Coix lachryma
  REGION 1..5: note = "ACE-inhibitor, Antihypertensive"; --NA--; It is used to explore the pharmacological mechanism of Traditional Chinese Medicine (TCM) proteins
NPATY

SEQ ID NO: 262 - protein, 5 aa, Prunus dulcis
  REGION 1..5: note = Prunus dulcis, Prunus amygdalus; "ACE-inhibitor, Antihypertensive"; --NA--; Used as potent ACE inhibitory peptides which significantly regulate the release of nitric oxide an
QHTDD

SEQ ID NO: 263 - protein, 19 aa, Arachis hypogaea
  REGION 1..19: note = "ACE-inhibitor, Antihypertensive"; Arachin; Shows ACE-inhibitory and antihypertensive activity. It behave as transition state analog inhibitor
VTFRQGGEENECQFQRLNA

SEQ ID NO: 264 - protein, 5 aa, Glycine max
  REGION 1..5: note = "ACE-inhibitor, Antihypertensive"; Bioactive peptides; Shows angiotensin-I converting enzyme (ACE-I) inhibition and antihypertensive activity
LVQGS

SEQ ID NO: 265 - protein, 6 aa, Linum usitatissimum
  REGION 1..6: note = "ACE-inhibitor, Antihypertensive"; --NA--; Shows angiotensin-I converting enzyme (ACE-I) inhibitory activity
NIDTDI

SEQ ID NO: 266 - protein, 6 aa, Linum usitatissimum
  REGION 1..6: note = "ACE-inhibitor, Antihypertensive"; --NA--; Shows angiotensin-I converting enzyme (ACE-I) inhibitory activity
NLDTDL

SEQ ID NO: 267 - protein, 5 aa, Ipomoea batatas
  REGION 1..5: note = "ACE-inhibitor, Antihypertensive"; Bioactive peptides; Shows angiotensin-I converting enzyme (ACE-I) inhibition and antihypertensive activity
STYQT

SEQ ID NO: 268 - protein, 5 aa, Cicer arietinum
  REGION 1..5: note = "ACE-inhibitor, Antihypertensive"; Bioactive peptides; "BPs were used as angiotensin converting enzyme inhibitory, antioxidant, cancer preventing, and oth"
MDFLI

SEQ ID NO: 269 - protein, 6 aa, Glycine max
  REGION 1..6: note = "ACE-inhibitor, Antihypertensive, Antioxidant"; --NA--; It shows the antihypertensive and antioxidant activity which is resistance to in vitro gastrointes
ANSLLN

SEQ ID NO: 270 - protein, 7 aa, Glycine max
  REGION 1..7: note = "ACE-inhibitor, Antihypertensive, Antioxidant"; --NA--; It shows the antihypertensive and antioxidant activity which is resistance to in vitro gastrointes
DFYNPKA

SEQ ID NO: 271 - protein, 6 aa, Glycine max
  REGION 1..6: note = "ACE-inhibitor, Antihypertensive, Antioxidant"; --NA--; It shows the antihypertensive and antioxidant activity which is resistance to in vitro gastrointes
EEGGSV

SEQ ID NO: 272 - protein, 7 aa, Glycine max
  REGION 1..7: note = "ACE-inhibitor, Antihypertensive, Antioxidant"; --NA--; It shows the antihypertensive and antioxidant activity which is resistance to in vitro gastrointes
FLVPPQE

SEQ ID NO: 273 - protein, 9 aa, Glycine max
  REGION 1..9: note = "ACE-inhibitor, Antihypertensive, Antioxidant"; --NA--; It shows the antihypertensive and antioxidant activity which is resistance to in vitro gastrointes
FPFPRPPHQ

SEQ ID NO: 274 - protein, 7 aa, Glycine max
  REGION 1..7: note = "ACE-inhibitor, Antihypertensive, Antioxidant"; --NA--; It shows the antihypertensive and antioxidant activity which is resistance to in vitro gastrointes
GANSLLN

SEQ ID NO: 275 - protein, 6 aa, Glycine max
  REGION 1..6: note = "ACE-inhibitor, Antihypertensive, Antioxidant"; --NA--; It shows the antihypertensive and antioxidant activity which is resistance to in vitro gastrointes
GKGIFG

SEQ ID NO: 276 - protein, 7 aa, Glycine max
  REGION 1..7: note = "ACE-inhibitor, Antihypertensive, Antioxidant"; --NA--; It shows the antihypertensive and antioxidant activity which is resistance to in vitro gastrointes
IPSEVLA

SEQ ID NO: 277 - protein, 7 aa, Glycine max
  REGION 1..7: note = "ACE-inhibitor, Antihypertensive, Antioxidant"; --NA--; It shows the antihypertensive and antioxidant activity which is resistance to in vitro gastrointes
IPSEVLS

SEQ ID NO: 278 - protein, 5 aa, Glycine max
  REGION 1..5: note = "ACE-inhibitor, Antihypertensive, Antioxidant"; --NA--; It shows the antihypertensive and antioxidant activity which is resistance to in vitro gastrointes
KGAIG

SEQ ID NO: 279 - protein, 5 aa, Glycine max
  REGION 1..5: note = "ACE-inhibitor, Antihypertensive, Antioxidant"; --NA--; It shows the antihypertensive and antioxidant activity which is resistance to in vitro gastrointes
KGALG

SEQ ID NO: 280 - protein, 5 aa, Glycine max
  REGION 1..5: note = "ACE-inhibitor, Antihypertensive, Antioxidant"; --NA--; It shows the antihypertensive and antioxidant activity which is resistance to in vitro gastrointes
KGIFG

SEQ ID NO: 281 - protein, 5 aa, Glycine max
  REGION 1..5: note = "ACE-inhibitor, Antihypertensive, Antioxidant"; --NA--; It shows the antihypertensive and antioxidant activity which is resistance to in vitro gastrointes
KGLFG

SEQ ID NO: 282 - protein, 6 aa, Glycine max
  REGION 1..6: note = "ACE-inhibitor, Antihypertensive, Antioxidant"; --NA--; It shows the antihypertensive and antioxidant activity which is resistance to in vitro gastrointes
KGVITQ

SEQ ID NO: 283 - protein, 5 aa, Glycine max
  REGION 1..5: note = "ACE-inhibitor, Antihypertensive, Antioxidant"; --NA--; It shows the antihypertensive and antioxidant activity which is resistance to in vitro gastrointes
KHFLA

SEQ ID NO: 284 - protein, 5 aa, Glycine max
  REGION 1..5: note = "ACE-inhibitor, Antihypertensive, Antioxidant"; --NA--; It shows the antihypertensive and antioxidant activity which is resistance to in vitro gastrointes
KNILE

SEQ ID NO: 285 - protein, 5 aa, Glycine max
  REGION 1..5: note = "ACE-inhibitor, Antihypertensive, Antioxidant"; --NA--; It shows the antihypertensive and antioxidant activity which is resistance to in vitro gastrointes
NQLDQ

SEQ ID NO: 286 - protein, 8 aa, Glycine max
  REGION 1..8: note = "ACE-inhibitor, Antihypertensive, Antioxidant"; --NA--; It shows the antihypertensive and antioxidant activity which is resistance to in vitro gastrointes
NSGPLVNP

SEQ ID NO: 287 - protein, 7 aa, Glycine max
  REGION 1..7: note = "ACE-inhibitor, Antihypertensive, Antioxidant"; --NA--; It shows the antihypertensive and antioxidant activity which is resistance to in vitro gastrointes
NTGNLLG

SEQ ID NO: 288 - protein, 6 aa, Glycine max
  REGION 1..6: note = "ACE-inhibitor, Antihypertensive, Antioxidant"; --NA--; It shows the antihypertensive and antioxidant activity which is resistance to in vitro gastrointes
RDPIYS

SEQ ID NO: 289 - protein, 6 aa, Glycine max
  REGION 1..6: note = "ACE-inhibitor, Antihypertensive, Antioxidant"; --NA--; It shows the antihypertensive and antioxidant activity which is resistance to in vitro gastrointes
RNPIYS

SEQ ID NO: 290 - protein, 6 aa, Glycine max
  REGION 1..6: note = "ACE-inhibitor, Antihypertensive, Antioxidant"; --NA--; It shows the antihypertensive and antioxidant activity which is resistance to in vitro gastrointes
VEGGLS

SEQ ID NO: 291 - protein, 5 aa, Glycine max
  REGION 1..5: note = "ACE-inhibitor, Antihypertensive, Antioxidant"; --NA--; It shows the antihypertensive and antioxidant activity which is resistance to in vitro gastrointes
YNLRQ

SEQ ID NO: 292 - protein, 5 aa, Glycine max
  REGION 1..5: note = "ACE-inhibitor, Antihypertensive, Antioxidant"; --NA--; It shows the antihypertensive and antioxidant activity which is resistance to in vitro gastrointes
RPSYT

SEQ ID NO: 293 - protein, 13 aa, Phaseolus vulgaris
  REGION 1..13: note = "ACE-inhibitor, Antioxidant"; Bioactive peptides; "Precooked Bioactive sequences (NKL,KL,NK,LL,EL,LK,LL) precooked beans could contribute to the inta"
LRENNKLMLLELK

SEQ ID NO: 294 - protein, 5 aa, Phaseolus vulgaris
  REGION 1..5: note = "ACE-inhibitor, Antioxidant"; Bioactive peptides; "Precooked Bioactive sequences (RW,EK,RWA,RW) precooked beans could contribute to the intake of bio"
RWAEK

SEQ ID NO: 295 - protein, 6 aa, Phaseolus vulgaris
  REGION 1..6: note = "ACE-inhibitor, Antioxidant"; Bioactive peptides; "Precooked Bioactive sequences (YG, YCY) precooked beans could contribute to the intake of bioactiv"
SPYCYG

SEQ ID NO: 296 - protein, 7 aa, Phaseolus vulgaris
  REGION 1..7: note = "ACE-inhibitor, Antioxidant"; Bioactive peptides; "Precooked Bioactive sequences (LY, YG, YK) precooked beans could contribute to the intake of bioac"
YGNWLYK

SEQ ID NO: 297 - protein, 50 aa, Olea europaea
  REGION 1..50: note = Allergen; --NA--; causes allergic reaction
DEAQFKECYDTCHKECSDKGNGFTFCEMKCDTDCSVKDVKEKLENYKPKN

SEQ ID NO: 298 - protein, 45 aa, Ambrosia artemisiifolia
  REGION 1..45: note = Ambrosia artemisiifolia var. elatior; Allergen; --NA--; causes an allergic reaction in human
LLPCAWAGNVCGEKRAYCCSDPGRYCPWQVVCYESSEICSKKCGK

SEQ ID NO: 299 - protein, 45 aa, Ambrosia artemisiifolia
  REGION 1..45: note = Ambrosia artemisiifolia var. elatior; Allergen; --NA--; causes an allergic reaction in human
LVPCAWAGNVCGEKRAYCCSDPGRYCPWQVVCYESSEICSKKCGK

SEQ ID NO: 300 - protein, 38 aa, Triticum aestivum
  REGION 1..38: note = Allergen; --NA--; causes allergic reaction
SQQQQPPFSQQQPPFSQQQQPPFSQQQQPPFSQQQPPF

SEQ ID NO: 301 - protein, 10 aa, Citrus sinensis
  REGION 1..10: note = Allergen; --NA--; causes allergic reaction in human; binds to IgE.
STQAYVDDHL

SEQ ID NO: 302 - protein, 5 aa, Arachis hypogaea
  REGION 1..5: note = Allergen; --NA--; --NA--
ISFRQ

SEQ ID NO: 303 - protein, 10 aa, Phleum pratense
  REGION 1..10: note = Allergen; --NA--; Shows strongest immunologic properties against pollen allergen
IVALPXGMLK

SEQ ID NO: 304 - protein, 13 aa, Arachis hypogaea
  REGION 1..13: note = Allergen; --NA--; --NA--
MRRERGRQGDSSS

SEQ ID NO: 305 - protein, 10 aa, Arachis hypogaea
  REGION 1..10: note = Allergen; --NA--; --NA--
RQQXELQGDR

SEQ ID NO: 306 - protein, 10 aa, Phaseolus vulgaris
  REGION 1..10: note = Alpha-amylase-inhibitor; --NA--; Shows inhibitory effects of antioxidant and  -amylase.
FNPFPSPHTP

SEQ ID NO: 307 - protein, 12 aa, Phaseolus vulgaris
  REGION 1..12: note = Alpha-amylase-inhibitor; --NA--; Shows inhibitory effects of antioxidant and  -amylase.
GDAACCGLPLLP

SEQ ID NO: 308 - protein, 8 aa, Phaseolus vulgaris
  REGION 1..8: note = Alpha-amylase-inhibitor; --NA--; Act as  -amylase inhibitor peptide and show the highest potency in the binding interaction.
PLPLHMLP

SEQ ID NO: 309 - protein, 8 aa, Phaseolus vulgaris
  REGION 1..8: note = Alpha-amylase-inhibitor; --NA--; Act as  -amylase inhibitor peptide and show the highest potency in the binding interaction.
PLPWGAGF

SEQ ID NO: 310 - protein, 7 aa, Phaseolus vulgaris
  REGION 1..7: note = Alpha-amylase-inhibitor; --NA--; Act as  -amylase inhibitor peptide and show the highest potency in the binding interaction.
PPHMGGP

SEQ ID NO: 311 - protein, 6 aa, Phaseolus vulgaris
  REGION 1..6: note = Alpha-amylase-inhibitor; --NA--; Act as  -amylase inhibitor peptide and show the highest potency in the binding interaction.
PPHMLP

SEQ ID NO: 312 - protein, 21 aa, Coffea canephora
  REGION 1..21: note = "Alpha-amylase-inhibitor, Antifungal"; --NA--; It has the ability to inhibit mammalian  -amylase activity and exhibited strong antifungal activit
LTCQQVTSELGPCVPYLTGQG

SEQ ID NO: 313 - protein, 48 aa, Capsicum annuum
  REGION 1..48: note = "Alpha-amylase-inhibitor, Antifungal"; --NA--; "The S3 fraction showed the highest antifungal activity, inhibiting all the yeast strains tested, a"
NCDTDIAYMVCPSSGERIIRKVCTNCCAAQKGCCKLFRSNGSIKCTGT

SEQ ID NO: 314 - protein, 17 aa, Cuminum cyminum
  REGION 1..17: note = "Alpha-amylase-inhibitor, Antioxidant"; --NA--; --NA--
DPAQPNYPWTAVLVFRH

SEQ ID NO: 315 - protein, 23 aa, Cuminum cyminum
  REGION 1..23: note = "Alpha-amylase-inhibitor, Antioxidant"; --NA--; --NA--
FFRSKLLSDGAAAAKGALLPQYW

SEQ ID NO: 316 - protein, 22 aa, Cuminum cyminum
  REGION 1..22: note = "Alpha-amylase-inhibitor, Antioxidant"; --NA--; --NA--
RCMAFLLSDGAAAAQQLLPQYW

SEQ ID NO: 317 - protein, 32 aa, Viola odorata
  REGION 1..32: note = Anthelmintic; Cyclotide; Shows variable number of anthelmintic activity in different cyclotides
GGTIFDGETCFLGTCYTPGCSCGNYGFCYGTN

SEQ ID NO: 318 - protein, 29 aa, Viola odorata
  REGION 1..29: note = Anthelmintic; Cyclotide; Shows variable number of anthelmintic activity in different cyclotides
GIPAESCVWIPCTVTALVGCSCSDKVCYN

SEQ ID NO: 319 - protein, 29 aa, Viola odorata
  REGION 1..29: note = Anthelmintic; Cyclotide; Shows variable number of anthelmintic activity in different cyclotides
GIPAESCVYIPCTVTALLGCSCSNRVCYN

SEQ ID NO: 320 - protein, 29 aa, Viola odorata
  REGION 1..29: note = Anthelmintic; Cyclotide; Shows variable number of anthelmintic activity in different cyclotides
GIPGESCVWIPCISSAIGCSCKSKVCYRN

SEQ ID NO: 321 - protein, 29 aa, Viola odorata
  REGION 1..29: note = Anthelmintic; Cyclotide; Shows variable number of anthelmintic activity in different cyclotides
GIPGESCVWIPCLTSAIGCSCKSKVCYRN

SEQ ID NO: 322 - protein, 29 aa, Viola odorata
  REGION 1..29: note = Anthelmintic; Cyclotide; Shows variable number of anthelmintic activity in different cyclotides
GLPGESCVWLPCLSAAIGCSCKSKVCYRN

SEQ ID NO: 323 - protein, 28 aa, Viola odorata
  REGION 1..28: note = Anthelmintic; Cyclotide; Shows variable number of anthelmintic activity in different cyclotides
GLPGETCFGGTCNTPGCTCDPWPVCTHN

SEQ ID NO: 324 - protein, 28 aa, Viola odorata
  REGION 1..28: note = Anthelmintic; Cyclotide; Shows variable number of anthelmintic activity in different cyclotides
GLPGETCFTGKCYTPGCSCSYPICKKIN

SEQ ID NO: 325 - protein, 28 aa, Viola odorata
  REGION 1..28: note = Anthelmintic; Cyclotide; Shows variable number of anthelmintic activity in different cyclotides
GLPIGETCVGGTCNTPGCSCSWPVCTRN

SEQ ID NO: 326 - protein, 28 aa, Viola odorata
  REGION 1..28: note = Anthelmintic; Cyclotide; Shows variable number of anthelmintic activity in different cyclotides
GLPTGETCFGGTCNTPGCSCSWPICTRN

SEQ ID NO: 327 - protein, 29 aa, Viola odorata
  REGION 1..29: note = Anthelmintic; Cyclotide; Shows variable number of anthelmintic activity in different cyclotides
GLPVGETCFGGTCNTPGCLCDPWPVCTRN

SEQ ID NO: 328 - protein, 28 aa, Viola odorata
  REGION 1..28: note = Anthelmintic; Cyclotide; Shows variable number of anthelmintic activity in different cyclotides
GLPVGETCFGGTCNTPGCSCTWPICTRD

SEQ ID NO: 329 - protein, 28 aa, Viola odorata
  REGION 1..28: note = Anthelmintic; Cyclotide; Shows variable number of anthelmintic activity in different cyclotides
GLPVGETCTLGTCYTQGCTCSWPICKRN

SEQ ID NO: 330 - protein, 28 aa, Viola odorata
  REGION 1..28: note = Anthelmintic; Cyclotide; Shows variable number of anthelmintic activity in different cyclotides
GLPVGETCVGGTCNTPGCSCSWPVCTRN

SEQ ID NO: 331 - protein, 28 aa, Viola odorata
  REGION 1..28: note = Anthelmintic; Cyclotide; Shows variable number of anthelmintic activity in different cyclotides
GLPVGETCVGGTCNTPGCTCSWPVCTRN

SEQ ID NO: 332 - protein, 28 aa, Viola odorata
  REGION 1..28: note = Anthelmintic; Cyclotide; Shows variable number of anthelmintic activity in different cyclotides
GLVPGETCFTGKCYTPGCSCSYPLCKKN

SEQ ID NO: 333 - protein, 30 aa, Viola odorata
  REGION 1..30: note = Anthelmintic; Cyclotide; Shows variable number of anthelmintic activity in different cyclotides
GSLPAGESCFKGKCYTPGCSCSKYPLCAKN

SEQ ID NO: 334 - protein, 30 aa, Viola odorata
  REGION 1..30: note = Anthelmintic; Cyclotide; Shows variable number of anthelmintic activity in different cyclotides
GTLPGESCVWIPCLSSVVGCSCKSKVCYKN

SEQ ID NO: 335 - protein, 29 aa, Viola odorata
  REGION 1..29: note = Anthelmintic; Cyclotide; Shows variable number of anthelmintic activity in different cyclotides
GVPGESCVFIPCLTGVLGCSCSSNVCYLN

SEQ ID NO: 336 - protein, 29 aa, Viola odorata
  REGION 1..29: note = Anthelmintic; Cyclotide; Shows variable number of anthelmintic activity in different cyclotides
SISGESCAMISCFTEVIGCSCKNKVCYLN

SEQ ID NO: 337 - protein, 10 aa, Phaseolus vulgaris
  REGION 1..10: note = Anti-Allergen; Lectin; B-cell epitopes of allergen will be useful in understanding the allergen antibody responses as wel
DVPNNSGPAD

SEQ ID NO: 338 - protein, 9 aa, Phaseolus vulgaris
  REGION 1..9: note = Anti-Allergen; Lectin; T-cell epitopes of allergen will be useful in understanding the allergen antibody responses as wel
FNIDVPNNS

SEQ ID NO: 339 - protein, 12 aa, Phaseolus vulgaris
  REGION 1..12: note = Anti-Allergen; Lectin; B-cell epitopes of allergen will be useful in understanding the allergen antibody responses as wel
GRAFYSAPIQIW

SEQ ID NO: 340 - protein, 9 aa, Phaseolus vulgaris
  REGION 1..9: note = Anti-Allergen; Lectin; T-cell epitopes of allergen will be useful in understanding the allergen antibody responses as wel
LQRDATVSS

SEQ ID NO: 341 - protein, 10 aa, Phaseolus vulgaris
  REGION 1..10: note = Anti-Allergen; Lectin; Useful in understanding the allergen antibody responses as well as aiding in the development of ne
LSREFLLGLE

SEQ ID NO: 342 - protein, 12 aa, Phaseolus vulgaris
  REGION 1..12: note = Anti-Allergen; Lectin; B-cell epitopes of allergen will be useful in understanding the allergen antibody responses as wel
LYNVHWDPKPRH

SEQ ID NO: 343 - protein, 11 aa, Phaseolus vulgaris
  REGION 1..11: note = Anti-Allergen; Lectin; B-cell epitopes of allergen will be useful in understanding the allergen antibody responses as wel
NNYKYDSNAHT

SEQ ID NO: 344 - protein, 12 aa, Phaseolus vulgaris
  REGION 1..12: note = Anti-Allergen; Lectin; B-cell epitopes of allergen will be useful in understanding the allergen antibody responses as wel
NSATETSFSFQR

SEQ ID NO: 345 - protein, 12 aa, Phaseolus vulgaris
  REGION 1..12: note = Anti-Allergen; Lectin; B-cell epitopes of allergen will be useful in understanding the allergen antibody responses as wel
NVNDNGEPTLSS

SEQ ID NO: 346 - protein, 9 aa, Phaseolus vulgaris
  REGION 1..9: note = Anti-Allergen; Lectin; T-cell epitopes of allergen will be useful in understanding the allergen antibody responses as wel
SDGTTSEAL

SEQ ID NO: 347 - protein, 10 aa, Phaseolus vulgaris
  REGION 1..10: note = Anti-Allergen; Lectin; B-cell epitopes of allergen will be useful in understanding the allergen antibody responses as wel
VGSEPKDKGG

SEQ ID NO: 348 - protein, 9 aa, Oryza sativa
  REGION 1..9: note = "Anti-analgesic, Anti-amnestic, Anticancer, Immunomodulatory, Neuropeptide, Opioid-antagonist"; Bioactive peptides; It shows phagocytosis-promoting activity for human polymorphonuclear leukocytes and augmented the
GYPMYPLPR

SEQ ID NO: 349 - protein, 45 aa, Persea americana
  REGION 1..45: note = Persea americana var. drymifolia; Antibacterial; Defensin; --NA--
CETPSKHFNGLCIRSSNCASVCHGEHFTDGRCQGVRRRCMCLKPC

SEQ ID NO: 350 - protein, 79 aa, Persea americana
  REGION 1..79: note = Persea americana var. drymifolia; Antibacterial; Snakin; --NA--
FQSHSLPTPADERNLLQQIDCGTSCSARCRLSSRPRLCKRACGTCCARCNCVPSGTAGNLDECPCYANMTTHGNKRKCP

SEQ ID NO: 351 - protein, 11 aa, Brucea javanica
  REGION 1..11: note = Antibacterial; --NA--; --NA--
HTLCMDGGATY

SEQ ID NO: 352 - protein, 60 aa, Moringa oleifera
  REGION 1..60: note = Antibacterial; Cationic; --NA--
QGPGRQPDFQRCGQQLRNISPPQRCPSLRQAVQLTHQQQGQVGPQQVRQMYRVASNIPST

SEQ ID NO: 353 - protein, 7 aa, Cocos nucifera
  REGION 1..7: note = Antibacterial; --NA--; --NA--
CSYTMEA

SEQ ID NO: 354 - protein, 10 aa, Cocos nucifera
  REGION 1..10: note = Antibacterial; --NA--; --NA--
ESYFVFSVGM

SEQ ID NO: 355 - protein, 20 aa, Brassica rapa
  REGION 1..20: note = Brassica rapa subsp. Chinensis; Antibacterial; --NA--; --NA--
PAQPFRFPKHPQGPQTRPPI

SEQ ID NO: 356 - protein, 17 aa, Brassica oleracea
  REGION 1..17: note = Brassica oleracea var. alboglabra; Antibacterial; --NA--; --NA--
PAQPFRIKKRQGPFERP

SEQ ID NO: 357 - protein, 19 aa, Xanthosoma sagittifolium
  REGION 1..19: note = Antibacterial; --NA--; --NA--
PVVDTTGNNPLQQQEEYYV

SEQ ID NO: 358 - protein, 98 aa, Sesamum indicum
  REGION 1..98: note = Antibacterial; --NA--; --NA--
QEGCEWESRPCNRGCWLPRQWESVHMRFGVLVLWRAPQFEHFRECCNELRCEALRCMMRMRMEYWPRGLQDQQVYQRARDLEPRKHCGMSYPVECRMP

SEQ ID NO: 359 - protein, 20 aa, Solanum tuberosum
  REGION 1..20: note = Antibacterial; Defensin; --NA--
RNCESLSHRFKGPCTRDSNC

SEQ ID NO: 360 - protein, 8 aa, Cocos nucifera
  REGION 1..8: note = Antibacterial; --NA--; --NA--
VAGRAQGM

SEQ ID NO: 361 - protein, 27 aa, Jatropha curcas
  REGION 1..27: note = Antibacterial; --NA--; --NA--
VRDICKKEAERQDLSSCENYITQRRGY

SEQ ID NO: 362 - protein, 93 aa, Lens culinaris
  REGION 1..93: note = Antibacterial; Lipid-transfer protein; --NA--
AISCGAVTSDLSPCLTYLTGGPGPSPQCCGGVKKLLAAANTTPDRQAACNCLKSAAGSITKLNTNNAAALPGKCGVDIPYKISTSTNCNTVKF

SEQ ID NO: 363 - protein, 92 aa, Lens culinaris
  REGION 1..92: note = Antibacterial; Lipid-transfer protein; --NA--
AISCGAVTSDLSPCLTYLTGGPGPSPQCCGGVKKLLAAANTTPDRQAACNCLKSAAGSITKLNTNNAAALPGKCGVNIPYKISTSTNCNTVK

SEQ ID NO: 364 - protein, 24 aa, Spinacia oleracea
  REGION 1..24: note = Antibacterial; Defensin; --NA--
GIFSNMYXRTPAGYFRGPXGYXXN

SEQ ID NO: 365 - protein, 92 aa, Lens culinaris
  REGION 1..92: note = Antibacterial; Lipid-transfer protein; --NA--
AISCGAVTSDLSPCLTYLTGGPGPSPQCCGGVKKLLAAANTTPDRQAACNCLKSAAGSITKLNTNNAAALPGKCGVNIPYKISTTTNCNTVK

SEQ ID NO: 366 - protein, 32 aa, Clitoria ternatea
  REGION 1..32: note = Antibacterial; Cyclotide; Shown to possess anti-bacterial activity.
ARIPCGESCVWIPCTITALVGCACHEKVCYKS

SEQ ID NO: 367 - protein, 28 aa, Clitoria ternatea
  REGION 1..28: note = Antibacterial; Cyclotide; Shown to possess anti-bacterial activity.
DIPCGSTCLHVKCIPPCYCKNKVLCYRN

SEQ ID NO: 368 - protein, 30 aa, Clitoria ternatea
  REGION 1..30: note = Antibacterial; Cyclotide; Shown to possess anti-bacterial activity.
GDPLKCGESCFAGKCYTPGCTCDRPICKKN

SEQ ID NO: 369 - protein, 30 aa, Clitoria ternatea
  REGION 1..30: note = Antibacterial; Cyclotide; Shown to possess anti-bacterial activity.
GDPLKCGESCFAGKCYTPGCTCSRPICKKN

SEQ ID NO: 370 - protein, 30 aa, Clitoria ternatea
  REGION 1..30: note = Antibacterial; Cyclotide; Shown to possess anti-bacterial activity.
GFICGESCVYIPCITALLGCSCSNQICSKN

SEQ ID NO: 371 - protein, 31 aa, Clitoria ternatea
  REGION 1..31: note = Antibacterial; Cyclotide; Shown to possess anti-bacterial activity.
GFPCGESCVFIPCTVTALLGCSCKDKVCYKN

SEQ ID NO: 372 - protein, 29 aa, Clitoria ternatea
  REGION 1..29: note = Antibacterial; Cyclotide; Shown to possess anti-bacterial activity.
GLPICGETCFTGTCYTPGCTCSYPVCKKN

SEQ ID NO: 373 - protein, 29 aa, Clitoria ternatea
  REGION 1..29: note = Antibacterial; Cyclotide; Shown to possess anti-bacterial activity.
GSIRCGERCLLGRCHRPGCTCVRRICRRN

SEQ ID NO: 374 - protein, 31 aa, Clitoria ternatea
  REGION 1..31: note = Antibacterial; Cyclotide; Shown to possess anti-bacterial activity.
GTVPCGESCVFIPCITGIAGCSCKNKVCYLN

SEQ ID NO: 375 - protein, 31 aa, Clitoria ternatea
  REGION 1..31: note = Antibacterial; Cyclotide; Shown to possess anti-bacterial activity.
GVIPCGESCVFIPCITGAIGCSCKSKVCYRN

SEQ ID NO: 376 - protein, 98 aa, Triticum aestivum
  REGION 1..98: note = Triticum aestivum, Aegilops tauschii x Triticum turgidum, Secale cereale, Aegilops tauschii, Aegil; Antibacterial; Puroindoline-A; Target site: lipid bilayer
DVAGGGGAQQCPVETKLNSCRNYLLDRCSTMKDFPVTWRWWKWWKGGCQELLGECCSRLGQMPPQCRCNIIQGSIQGDLGGIFGFQRDRASKVIQEAK

SEQ ID NO: 377 - protein, 29 aa, Clitoria ternatea
  REGION 1..29: note = Antibacterial; Cyclotide; Target site- Lipid Bilayer; Cationic cliotides display potent antibacterial activity against Gram-
GLPICGETCFKTKCYTKGCSCSYPVCKRN

SEQ ID NO: 378 - protein, 30 aa, Clitoria ternatea
  REGION 1..30: note = Antibacterial; Cyclotide; Target site- Lipid Bilayer; Cationic cliotides display potent antibacterial activity against Gram-
GSAIRCGESCLLGKCYTPGCTCDRPICKKN

SEQ ID NO: 379 - protein, 30 aa, Clitoria ternatea
  REGION 1..30: note = Antibacterial; Cyclotide; Target site- Lipid Bilayer; Cationic cliotides display potent antibacterial activity against Gram-
GSVIGCGETCLRGRCYTPGCTCDHGICKKN

SEQ ID NO: 380 - protein, 28 aa, Clitoria ternatea
  REGION 1..28: note = Antibacterial; Cyclotide; "Target site- Lipid Bilayer, Shown to possess anti-bacterial activity."
DLQCAETCVHSPCIGPCYCKHGLICYRN

SEQ ID NO: 381 - protein, 31 aa, Clitoria ternatea
  REGION 1..31: note = Antibacterial; Cyclotide; "Target site- Lipid Bilayer, Shown to possess anti-bacterial activity."
DTIPCGESCVWIPCISSILGCSCKDKVCYHN

SEQ ID NO: 382 - protein, 31 aa, Clitoria ternatea
  REGION 1..31: note = Antibacterial; Cyclotide; "Target site- Lipid Bilayer, Shown to possess anti-bacterial activity."
DTTPCGESCVWIPCVSSIVGCSCQNKVCYQN

SEQ ID NO: 383 - protein, 30 aa, Clitoria ternatea
  REGION 1..30: note = Antibacterial; Cyclotide; Shown to possess anti-bacterial activity. Target site- Lipid Bilayer
GSVIKCGESCLLGKCYTPGCTCSRPICKKN

SEQ ID NO: 384 - protein, 46 aa, Triticum kiharae
  REGION 1..46: note = Triticum kiharae, Triticum urartu; Antibacterial; Defensin; Target site- Lipid Bilayer; These are identified as good candidates for development of natural add
RDCESDSHKFHGACFSDTNCANVCQTEGFAGKCVGVQRHCHCTKDC

SEQ ID NO: 385 - protein, 46 aa, Vigna unguiculata
  REGION 1..46: note = Antibacterial; Defensin; possesses antibacterial activity against the Gram-positive bacterium Staphylococcus aureus and the
KTCMTKKEGWGRCLIDTTCAHSCRKYGYMGGKCQGITRRCYCLLNC

SEQ ID NO: 386 - protein, 6 aa, Medicago sativa
  REGION 1..6: note = Antibacterial; --NA--; Shows antibacterial activity and cause morphological changes of L. innocua and destruction of the
ALRMSG

SEQ ID NO: 387 - protein, 6 aa, Medicago sativa
  REGION 1..6: note = Antibacterial; --NA--; Shows antibacterial activity and cause morphological changes of L. innocua and destruction of the
ELAAAC

SEQ ID NO: 388 - protein, 8 aa, Medicago sativa
  REGION 1..8: note = Antibacterial; --NA--; Shows antibacterial activity and cause morphological changes of L. innocua and destruction of the
GNAPGAVA

SEQ ID NO: 389 - protein, 18 aa, Oryza sativa
  REGION 1..18: note = Oryza sativa subsp. Japonica; Antibacterial; --NA--; "Showing variable antibacterial properties without a significant increase in hemolytic activity, by"
HLLKRVQRELIGWLDWLK

SEQ ID NO: 390 - protein, 18 aa, Oryza sativa
  REGION 1..18: note = Oryza sativa subsp. Japonica; Antibacterial; --NA--; "Showing variable antibacterial properties without a significant increase in hemolytic activity, by"
HLLKRVQRELIRWLDWLK

SEQ ID NO: 391 - protein, 18 aa, Oryza sativa
  REGION 1..18: note = Oryza sativa subsp. Japonica; Antibacterial; --NA--; "Showing variable antibacterial properties without a significant increase in hemolytic activity, by"
HLLKRVQRLLIGWLDWLK

SEQ ID NO: 392 - protein, 18 aa, Oryza sativa
  REGION 1..18: note = Oryza sativa subsp. Japonica; Antibacterial; --NA--; "Showing variable antibacterial properties without a significant increase in hemolytic activity, by"
HLNARVQRELIGWLDWLK

SEQ ID NO: 393 - protein, 18 aa, Oryza sativa
  REGION 1..18: note = Oryza sativa subsp. Japonica; Antibacterial; --NA--; "Showing variable antibacterial properties without a significant increase in hemolytic activity, by"
HLNKAVQRELIGWLDWLK

SEQ ID NO: 394 - protein, 18 aa, Oryza sativa
  REGION 1..18: note = Oryza sativa subsp. Japonica; Antibacterial; --NA--; "Showing variable antibacterial properties without a significant increase in hemolytic activity, by"
HLNKRVQAELIGWLDWLK

SEQ ID NO: 395 - protein, 18 aa, Oryza sativa
  REGION 1..18: note = Oryza sativa subsp. Japonica; Antibacterial; --NA--; "Showing variable antibacterial properties without a significant increase in hemolytic activity, by"
HLNKRVQRELIGWLDWLA

SEQ ID NO: 396 - protein, 18 aa, Oryza sativa
  REGION 1..18: note = Oryza sativa subsp. Japonica; Antibacterial; --NA--; "Showing variable antibacterial properties without a significant increase in hemolytic activity, by"
HLNKRVQRELIGWLRWLK

SEQ ID NO: 397 - protein, 18 aa, Oryza sativa
  REGION 1..18: note = Oryza sativa subsp. Japonica; Antibacterial; --NA--; "Showing variable antibacterial properties without a significant increase in hemolytic activity, by"
HLNKRVQRELIRWLDWLK

SEQ ID NO: 398 - protein, 18 aa, Oryza sativa
  REGION 1..18: note = Oryza sativa subsp. Japonica; Antibacterial; --NA--; "Showing variable antibacterial properties without a significant increase in hemolytic activity, by"
HLNKRVQRELRGWLDWLK

SEQ ID NO: 399 - protein, 18 aa, Oryza sativa
  REGION 1..18: note = Oryza sativa subsp. Japonica; Antibacterial; --NA--; "Showing variable antibacterial properties without a significant increase in hemolytic activity, by"
HLNKRVQRLLIGWLDWLK

SEQ ID NO: 400 - protein, 18 aa, Oryza sativa
  REGION 1..18: note = Oryza sativa subsp. Japonica; Antibacterial; --NA--; "Showing variable antibacterial properties without a significant increase in hemolytic activity, by"
HLNKRVQRLLIRWLDWLK

SEQ ID NO: 401 - protein, 5 aa, Medicago sativa
  REGION 1..5: note = Antibacterial; --NA--; Shows antibacterial activity and cause morphological changes of L. innocua and destruction of the
LRDDF

SEQ ID NO: 402 - protein, 62 aa, Psidium guajava
  REGION 1..62: note = Antibacterial; --NA--; It shows antibacterial activity and used as a biotechnological tool for control of human infectiou
MRESPSSRMECYEQAERYGYGGYGGGRYGGGYGSGRGQPVGQGVERSHDDNRNQPRHHHHHH

SEQ ID NO: 403 - protein, 5 aa, Medicago sativa
  REGION 1..5: note = Antibacterial; --NA--; Shows antibacterial activity and cause morphological changes of L. innocua and destruction of the
RDRFL

SEQ ID NO: 404 - protein, 93 aa, Lens culinaris
  REGION 1..93: note = Antibacterial; Lipid-transfer protein; --NA--
AISCGAVTSDLSPCLTYLTGGPGPSPQCCGGVKKLLAAANTTPDRQAACNCLKSAAGSITKLNTNNAAALPGKCGVNIPYKISTSTNCNTVKF

SEQ ID NO: 405 - protein, 93 aa, Lens culinaris
  REGION 1..93: note = Antibacterial; Lipid-transfer protein; --NA--
AISCGAVTSDLSPCLTYLTGGPGPSPQCCGGVKKLLAAANTTPDRQAACNCLKSAAGSITKLNTNNAAALPGKCGVNIPYKISTTTNCNTVKF

SEQ ID NO: 406 - protein, 93 aa, Lens culinaris
  REGION 1..93: note = Antibacterial; Lipid-transfer protein; --NA--
AVSCGTVTGDLAPCIPYLTGGAGPTDSCCAGVKKLLAAAPTTADRQAACNCLKTAAGNINNLNPGNAAALPGKCNVNIPYKISTTTNCNTIKF

SEQ ID NO: 407 - protein, 47 aa, Vicia faba
  REGION 1..47: note = Antibacterial; Defensin; is active against Gram-positive and Gram-negative bacteria
LLGRCKVKSNRFNGPCLTDTHCSTVCRGEGYKGGDCHGLRRRCMCLC

SEQ ID NO: 408 - protein, 47 aa, Vicia faba
  REGION 1..47: note = Antibacterial; Defensin; Fabatins have antibacterial activity against Gram-positive and Gram-negative bacteria. High activi
LLGRCKVKSNRFHGPCLTDTHCSTVCRGEGYKGGDCHGLRRRCMCLC

SEQ ID NO: 409 - protein, 7 aa, Oryza sativa
  REGION 1..7: note = "Antibacterial, Antibiofilm"; --NA--; Shows antibacterial and antibiofilm efficacies of a liposomal peptide. It is used for the treatmen
KVDHFPL

SEQ ID NO: 410 - protein, 30 aa, Clitoria ternatea
  REGION 1..30: note = "Antibacterial, Anticancer"; Cyclotide; --NA--
GSVIKCGESCLLGKCYTPGCTCSRPICKKD

SEQ ID NO: 411 - protein, 8 aa, Cycas revoluta
  REGION 1..8: note = "Antibacterial, Anticancer"; --NA--; --NA--
WKLFDDGV

SEQ ID NO: 412 - protein, 29 aa, Melicytus latifolius
  REGION 1..29: note = "Antibacterial, Anticancer"; Cyclotide; Target site- Lipid Bilayer; Human foreskin fibroblasts HFF-1(CC50: 3.13 0.16 micro-M); 50% Hemolysis
GLPTCGETCFKGKCYTPGCSCSYPICKKD

SEQ ID NO: 413 - protein, 27 aa, Steinchisma laxum
  REGION 1..27: note = "Antibacterial, Anticancer, Antifungal"; Cyclotide; Target site- Lipid Bilayer
XAFCGETCLLGKCYTPGCSCHTGICLK

SEQ ID NO: 414 - protein, 27 aa, Steinchisma laxum
  REGION 1..27: note = "Antibacterial, Anticancer, Antifungal"; Cyclotide; Target site- Lipid Bilayer
XAFCGETCLLGTCYTPGCRCTAGICLK

SEQ ID NO: 415 - protein, 27 aa, Steinchisma laxum
  REGION 1..27: note = "Antibacterial, Anticancer, Antifungal"; Cyclotide; Target site- Lipid Bilayer
XAFCGETCVLGTCYTPGCSCNFGICLK

SEQ ID NO: 416 - protein, 26 aa, Steinchisma laxum
  REGION 1..26: note = "Antibacterial, Anticancer, Antifungal"; Cyclotide; Target site- Lipid Bilayer
XDCGETCVLGTCYTPGCSCSAYPLCV

SEQ ID NO: 417 - protein, 28 aa, Steinchisma laxum
  REGION 1..28: note = "Antibacterial, Anticancer, Antifungal"; Cyclotide; Target site- Lipid Bilayer
XLPICGETCVLGTCYTPGCSCAYPICAR

SEQ ID NO: 418 - protein, 28 aa, Steinchisma laxum
  REGION 1..28: note = "Antibacterial, Anticancer, Antifungal"; Cyclotide; Target site- Lipid Bilayer
XLPICGETCVLGTCYTPGCSCAYPICVR

SEQ ID NO: 419 - protein, 35 aa, Echinopsis pachanoi
  REGION 1..35: note = "Antibacterial, Anticancer, Antifungal"; Cyclotide; "Target site- Lipid Bilayer, Cysteine-knot peptide shows rapid bactericidal action and liposome lea"
CVLIGQRCDNDRGPRCCSGQGNCVPLPFLGGVCAV

SEQ ID NO: 420 - protein, 10 aa, Allium sativum
  REGION 1..10: note = "Antibacterial, Anticancer, Antifungal"; Alliumin; Target site: lipid bilayer
DDFLCAGGCL

SEQ ID NO: 421 - protein, 31 aa, Clitoria ternatea
  REGION 1..31: note = "Antibacterial, Anticancer, Antifungal"; Cyclotide; Target site: lipid bilayer ; Cationic cliotides display potent antibacterial activity against Gram
GIPCGESCVFIPCTVTALLGCSCKDKVCYKN

SEQ ID NO: 422 - protein, 9 aa, Cycas revoluta
  REGION 1..9: note = "Antibacterial, Anticancer, Antifungal"; Anticancerous peptide 1; "Target site: lipid bilayer, DNA, RNA; Used to design a novel derivative of this peptide having the"
AWKLFDDGV

SEQ ID NO: 423 - protein, 34 aa, Momordica cochinchinensis
  REGION 1..34: note = Momordica cochinchinensis, Momordica macrophylla, Momordica sphaeroidea; "Antibacterial, Anticancer, Antifungal"; Protease inhibitor I7; Target site- Lipid Bilayer
GGVCPKILKKCRRDSDCPGACICRGNGYCGSGSD

SEQ ID NO: 424 - protein, 30 aa, Viola odorata
  REGION 1..30: note = "Antibacterial, Anticancer, Antifungal, Antiparasitic, Nematocide"; Cyclotide; participates in a plant defense mechanism; The cycloviolacin O3 showed significant activity in inh
GIPCGESCVWIPCLTSAIGCSCKSKVCYRN

SEQ ID NO: 425 - protein, 33 aa, Viola arvensis
  REGION 1..33: note = Viola arvensis, Viola tricolor; "Antibacterial, Anticancer, Antifungal, Antiviral, Hemolytic, Antimicrobial"; Cyclotide; "Target site- Lipid Bilayer, Shows minimal haemolytic activity, participates in a plant defense mec"
GGTIFDCGESCFLGTCYTKGCSCGEWKLCYGTN

SEQ ID NO: 426 - protein, 31 aa, Clitoria ternatea
  REGION 1..31: note = "Antibacterial, Anticancer, Antifungal, Cytotoxic"; Cyclotide; Target site: lipid bilayer ; Shows potent antimicrobial and cytotoxic activity.
GVPCAESCVWIPCTVTALLGCSCKDKVCYLN

SEQ ID NO: 427 - protein, 30 aa, Viola odorata
  REGION 1..30: note = Viola odorata, Viola biflora; "Antibacterial, Anticancer, Antifungal, Cytotoxic, Nematocide, Hemolytic, Anti-barnacle, Antiparasi"; Cyclotide; Shows innate immune defense mechanism to treat infections caused by pathogenic bacteria to animals
GIPCGESCVWIPCISSAIGCSCKSKVCYRN

SEQ ID NO: 428 - protein, 30 aa, Oldenlandia affinis
  REGION 1..30: note = "Antibacterial, Anticancer, Antifungal, Insecticidal"; Cyclotide; "Shown to possess insecticidal activity., Target site- Lipid Bilayer, Participate in the innate imm"
GLPVCGETCFGGTCNTPGCACDPWPVCTRD

SEQ ID NO: 429 - protein, 30 aa, Clitoria ternatea
  REGION 1..30: note = "Antibacterial, Anticancer, Antifungal, Insecticidal, Hemolytic, Anthelmintic, Cytotoxic"; Cyclotide; Target site- Lipid Bilayer; Shown to possess various antimicrobial and cytotoxic activities.
GLPCGESCVFIPCITTVVGCSCKNKVCYNN

SEQ ID NO: 430 - protein, 5 aa, Dianthus superbus
  REGION 1..5: note = "Antibacterial, Anticancer, Antifungal, Nematocide"; Cyclic Peptide; Target site- Lipid Bilayer
FYPFG

SEQ ID NO: 431 - protein, 29 aa, Viola hederacea
  REGION 1..29: note = Viola hederacea, Oldenlandia affinis; "Antibacterial, Anticancer, Antifungal, Nematocide, Molluscicidal, Antiparasitic, Hemolytic, Antimi"; Cyclic Peptide; "Target site- Lipid Bilayer; 50% Hemolysis against Human erythrocytes at 55.2  1.3 micro-M, The Kalata B"
GLPVCGETCTLGTCYTQGCTCSWPICKRN

SEQ ID NO: 432 - protein, 29 aa, Oldenlandia affinis
  REGION 1..29: note = "Antibacterial, Anticancer, Antifungal, Nematocide, Molluscicidal, Insecticidal, Hemolytic, Antivir"; Cyclic Peptide; The Kalata B2 showed significant activity in inhibiting development of nematode larvae and motilit
GLPVCGETCFGGTCNTPGCSCTWPICTRD

SEQ ID NO: 433 - protein, 34 aa, Momordica cochinchinensis
  REGION 1..34: note = "Antibacterial, Anticancer, Antifungal, Protease-inhibitor"; Protease inhibitor I7; Target site- Lipid Bilayer
GGVCPKILQRCRRDSDCPGACICRGNGYCGSGSD

SEQ ID NO: 434 - protein, 29 aa, Chassalia chartacea
  REGION 1..29: note = "Antibacterial, Anticancer, Antimicrobial, Cytotoxic, Hemolytic"; Cyclotide; "Target site: lipid bilayer; Shown to possess antimicrobial, cytotoxic, and hemolytic activities an"
AIPCGESCVWIPCISTVIGCSCSNKVCYR

SEQ ID NO: 435 - protein, 29 aa, Melicytus latifolius
  REGION 1..29: note = "Antibacterial, Anticancer, Cytotoxic"; Cyclotide; "Shows cytotoxocity against cancer cell lines and low toxicity against red blood cells, Target site"
GKPICGETCFKGKCYTPGCTCSYPICKKN

SEQ ID NO: 436 - protein, 29 aa, Melicytus latifolius
  REGION 1..29: note = "Antibacterial, Anticancer, Cytotoxic"; Cyclotide; "Shows cytotoxocity against cancer cell lines and low toxicity against red blood cells, Target site"
GKPTCGETCFKGKCYTPGCTCSYPLCKKD

SEQ ID NO: 437 - protein, 29 aa, Melicytus latifolius
  REGION 1..29: note = "Antibacterial, Anticancer, Cytotoxic"; Cyclotide; Target site- Lipid BilayShows cytotoxocity against cancer cell lines and low toxicity against red
GKYTCGETCFKGKCYTPGCTCSYPICKKD

SEQ ID NO: 438 - protein, 29 aa, Melicytus latifolius
  REGION 1..29: note = "Antibacterial, Anticancer, Cytotoxic"; Cyclotide; Shows cytotoxocity against cancer cell lines and low toxicity against red blood cells. Target site
GLPTCGETCFKGKCYTPGCSCSYPICKKN

SEQ ID NO: 439 - protein, 30 aa, Clitoria ternatea
  REGION 1..30: note = "Antibacterial, Anticancer, Cytotoxic"; Cyclotide; Target site: lipid bilayer; shows 50% Hemolysis against Human erythrocytes at >100 micro-M; Shows innat
GEFLKCGESCVQGECYTPGCSCDWPICKKN

SEQ ID NO: 440 - protein, 30 aa, Clitoria ternatea
  REGION 1..30: note = "Antibacterial, Anticancer, Cytotoxic, Antimicrobial, Immunomodulatory, Nematocide, Hemolytic"; Cyclotide; Target site: lipid bilayer; shows 50% Hemolysis against Human erythrocytes at 7.1 micro-M; Shows innate
GIPCGESCVFIPCITGAIGCSCKSKVCYRN

SEQ ID NO: 441 - protein, 28 aa, Chassalia chartacea
  REGION 1..28: note = "Antibacterial, Anticancer, Cytotoxic, Hemolytic"; Cyclotide; Target site: lipid bilayer; shows 50% Hemolysis against Human erythrocytes at 13.3 micro-M ; Shown to p
IPCGESCVWIPCISGMFGCSCKDKVCYS

SEQ ID NO: 442 - protein, 28 aa, Chassalia chartacea
  REGION 1..28: note = "Antibacterial, Anticancer, Cytotoxic, Hemolytic"; Cyclotide; Target site: lipid bilayer; shows 50% Hemolysis against Human erythrocytes at 11.6 micro-M ; Shown to p
IPCGESCVWIPCITAIAGCSCKNKVCYT

SEQ ID NO: 443 - protein, 66 aa, Solanum lycopersicum
  REGION 1..66: note = "Antibacterial, Antifungal"; Snakin; --NA--
DSYKKIDCGGACAARCRLSSRPRLCHRACGTCCARCNCVPPGTSGNTETCPCYASLTTHGNKRKCP

SEQ ID NO: 444 - protein, 26 aa, Coriandrum sativum
  REGION 1..26: note = "Antibacterial, Antifungal"; --NA--; --NA--
GGYKNFYGSALRKGFYEGEAGRAIRR

SEQ ID NO: 445 - protein, 66 aa, Medicago sativa
  REGION 1..66: note = "Antibacterial, Antifungal"; Snakin; --NA--
GTDSGRFCSSICGQRCSKAGMKDRCMKFCGICCGKCKCVPSGTYGNKHECPCYRDMKNSKGKPKCP

SEQ ID NO: 446 - protein, 22 aa, Coffea canephora
  REGION 1..22: note = "Antibacterial, Antifungal"; Lipid-transfer protein; --NA--
ITCQQVTAELEPCVPYLTQGIP

SEQ ID NO: 447 - protein, 66 aa, Capsicum annuum
  REGION 1..66: note = "Antibacterial, Antifungal"; Thionin; --NA--
KEICCKVPTTPFLCTNDPQCKTLCSKVNYEDGHCFDILSKCVCMNRCVQDAKTLAAELIEEEFLKQ

SEQ ID NO: 448 - protein, 98 aa, Morus alba
  REGION 1..98: note = "Antibacterial, Antifungal"; --NA--; --NA--
AIQDFCVADYSAPQGPAGYSCKNPAKVTVDNFVYSGLGITGNTTNLIKAAVTTAFDNQFPGVNGLGISLARPDLAPGGVIPFHTHPGASEIIIVIEGS

SEQ ID NO: 449 - protein, 41 aa, Macadamia integrifolia
  REGION 1..41: note = "Antibacterial, Antifungal"; --NA--; --NA--
DPQTECQQCQRRCRQQESDPRQQQYCQRRCKEICEEEEEYN

SEQ ID NO: 450 - protein, 98 aa, Hordeum vulgare
  REGION 1..98: note = "Antibacterial, Antifungal"; --NA--; --NA--
DVGGGGGSQQCPQERPNLGSCKDYVMERCFTMKDFPVTWPTKWWKGGCEHEVREKCCQQLSQIAPHCRCDAIRGVIQGKLGGIFGIGGGAVFKQIQRA

SEQ ID NO: 451 - protein, 98 aa, Hordeum vulgare
  REGION 1..98: note = "Antibacterial, Antifungal"; --NA--; --NA--
EGGAGGGGAQQCPLGTKLDSCRNYLLDRCTTMKDFPVTWRWWTWWKGGCEELLHDCCSQLSQMPPQCRCNIIQGSIQRDLGGFFGFQRDRTVKVIQAA

SEQ ID NO: 452 - protein, 35 aa, Macadamia integrifolia
  REGION 1..35: note = "Antibacterial, Antifungal"; --NA--; --NA--
KRDPQQREYEDCRRHCEQQEPRLQYQCQRRCQEQQ

SEQ ID NO: 453 - protein, 21 aa, Vigna radiata
  REGION 1..21: note = Vigna radiata var. radiata; "Antibacterial, Antifungal"; --NA--; --NA--
MTCGQVQGNLAQCIGFLQKGG

SEQ ID NO: 454 - protein, 35 aa, Macadamia integrifolia
  REGION 1..35: note = "Antibacterial, Antifungal"; --NA--; --NA--
QCMQLETSGQMRRCVSQCDKRFEEDIDWSKYDNQE

SEQ ID NO: 455 - protein, 43 aa, Triticum kiharae
  REGION 1..43: note = "Antibacterial, Antifungal"; --NA--; --NA--
QRCGDQARGAKCPNCLCCGKYGFCGSGDAYCGAGSCQSQCRGC

SEQ ID NO: 456 - protein, 98 aa, Hordeum vulgare
  REGION 1..98: note = "Antibacterial, Antifungal"; --NA--; --NA--
QYSVGGGYNDVGGGGGSQQCPQERPNLGSCKDYVMERCFTMKDFPLTWPTKWWKGGCEQEVREKCCQQLSQIAPQCRCDAIRGVIQGKLGGIFGIGGG

SEQ ID NO: 457 - protein, 45 aa, Macadamia integrifolia
  REGION 1..45: note = "Antibacterial, Antifungal"; --NA--; --NA--
RQRDPQQQYEQCQKRCQRRETEPRHMQICQQRCERRYEKEKRKQQ

SEQ ID NO: 458 - protein, 47 aa, Macadamia integrifolia
  REGION 1..47: note = "Antibacterial, Antifungal"; --NA--; --NA--
RQRDPQQQYEQCQKRCQRRETEPRHMQICQQRCERRYEKEKRKQQKR

SEQ ID NO: 459 - protein, 67 aa, Macadamia integrifolia
  REGION 1..67: note = "Antibacterial, Antifungal"; --NA--; --NA--
RQRDPQQQYEQCQKRCQRRETEPRHMQICQQRCERRYEKEKRKQQKRYEEQQREDEEKYEERMKEGD

SEQ ID NO: 460 - protein, 98 aa, Ricinus communis
  REGION 1..98: note = "Antibacterial, Antifungal"; --NA--; --NA--
STTHQEVRPLAYFPPTVWGNRFASLTFNPSEFESYDERVIVLKKKVKDILISSTSDSVETVILIDLLCRLGVSYHFENDIEELLSKIFNSQPDLVDEK

SEQ ID NO: 461 - protein, 15 aa, Solanum tuberosum
  REGION 1..15: note = "Antibacterial, Antifungal"; --NA--; --NA--
SYKKIDCGGACAARC

SEQ ID NO: 462 - protein, 29 aa, Oldenlandia affinis
  REGION 1..29: note = "Antibacterial, Antifungal"; Cyclotide; --NA--
VCGETCVGGTCNTPGCTCSWPVCTRNGLP

SEQ ID NO: 463 - protein, 24 aa, Spinacia oleracea
  REGION 1..24: note = "Antibacterial, Antifungal"; Defensin; --NA--
GIFSNMYARTPAGYFRGPAGYAAN

SEQ ID NO: 464 - protein, 63 aa, Solanum tuberosum
  REGION 1..63: note = "Antibacterial, Antifungal"; Snakin; --NA--
GSNFCDSKCKLRCSKAGLADRCLKYCGICCEECKCVPSGTYGNKHECPCYRDKKNSKGKSKCP

SEQ ID NO: 465 - protein, 47 aa, Phaseolus vulgaris
  REGION 1..47: note = "Antibacterial, Antifungal"; Defensin; --NA--
KTCENLADTFRGPCFATSNCDDHCKNKEHLLSGRCRDDFRCWCTRNC

SEQ ID NO: 466 - protein, 24 aa, Spinacia oleracea
  REGION 1..24: note = "Antibacterial, Antifungal"; Defensin; --NA--
MFFSSKKCKTVSKTFRGPCVRNAN

SEQ ID NO: 467 - protein, 54 aa, Pentadiplandra brazzeana
  REGION 1..54: note = "Antibacterial, Antifungal"; Defensin; --NA--
QDKCKKVYENYPVSKCQLANQCNYDCKLDKHARSGECFYDEKRNLQCICDYCEY

SEQ ID NO: 468 - protein, 19 aa, Solanum tuberosum
  REGION 1..19: note = "Antibacterial, Antifungal"; Thionin; --NA--
RNCESLSHRFKGPCTRDSN

SEQ ID NO: 469 - protein, 45 aa, Vigna angularis
  REGION 1..45: note = "Antibacterial, Antifungal"; Defensin; --NA--
RTCMKKEGWGKCLIDTTCAHSCKNRGYIGGNCKGMTRTCYCLVNC

SEQ ID NO: 470 - protein, 92 aa, Oryza sativa
  REGION 1..92: note = "Antibacterial, Antifungal"; Lipid-transfer protein; --NA--
VSCGDVTSSIAPCLSYVMGRESSPSSSCCSGVRTLNGKASSSADRRTACSCLKNMASSFRNLNMGNAASIPSKCGVSVAFPISTSVDCSKIN

SEQ ID NO: 471 - protein, 46 aa, Hordeum vulgare
  REGION 1..46: note = "Antibacterial, Antifungal"; Thionin; "is toxic to animal cells, to plant-pathogenic fungi"
KSCCKDTLARNCYNTCRFAGGSRPVCAGACRCKIISGPKCPSDYPK

SEQ ID NO: 472 - protein, 63 aa, Solanum tuberosum
  REGION 1..63: note = "Antibacterial, Antifungal"; Snakin; Target site: lipid bilayer
GSSFCDSKCKLRCSKAGLADRCLKYCGICCEECKCVPSGTYGNKHECPCYRDKKNSKGKSKCP

SEQ ID NO: 473 - protein, 45 aa, Phyllostachys pubescens
  REGION 1..45: note = "Antibacterial, Antifungal"; Chitin-binding; Target site: lipid bilayer
KSCCRSTTARTARVPCAKKSNIYNGCRVPGGCKIQEAKKCEPPYD

SEQ ID NO: 474 - protein, 51 aa, Arabidopsis thaliana
  REGION 1..51: note = "Antibacterial, Antifungal"; Defensin; Target site: lipid bilayer
XKLCERPSGTWSGVCGNSNACKNQCINLEKARHGSCNYVFPAHKCICYFPC

SEQ ID NO: 475 - protein, 51 aa, Raphanus sativus
  REGION 1..51: note = "Antibacterial, Antifungal"; Defensin; Target site: lipid bilayer
XKLCQRPSGTWSGVCGNNNACKNQCIRLEKARHGSCNYVFPAHKCICYFPC

SEQ ID NO: 476 - protein, 51 aa, Sinapis alba
  REGION 1..51: note = "Antibacterial, Antifungal"; Defensin; Target site: lipid bilayer
XKLCQRPXGTWSGVCGNNNACRNQCINLEKARHGSCNYVFPAHKCICYFPC

SEQ ID NO: 477 - protein, 28 aa, Steinchisma laxum
  REGION 1..28: note = "Antibacterial, Antifungal"; Cyclotide; Target site- Lipid Bilayer
XLPICGETCVLGRCYTPNCRCQYPICVR

SEQ ID NO: 478 - protein, 28 aa, Steinchisma laxum
  REGION 1..28: note = "Antibacterial, Antifungal"; Cyclotide; Target site- Lipid Bilayer
XLPICGETCVLGTCYTPGCRCQYPICVR

SEQ ID NO: 479 - protein, 40 aa, Ipomoea nil
  REGION 1..40: note = "Antibacterial, Antifungal"; Hevein; Target site- Lipid Bilayer; Not active up to 200 micro-g/ml- Monkey kidney cells MA104
XQCGRQASGRLCGNRLCCSQWGYCGSTASYCGAGCQSQCR

SEQ ID NO: 480 - protein, 41 aa, Ipomoea nil
  REGION 1..41: note = "Antibacterial, Antifungal"; Hevein; Target site- Lipid Bilayer; Not active up to 200 micro-g/ml- Monkey kidney cells MA104
XQCGRQASGRLCGNRLCCSQWGYCGSTASYCGAGCQSQCRS

SEQ ID NO: 481 - protein, 20 aa, Impatiens balsamina
  REGION 1..20: note = "Antibacterial, Antifungal"; --NA--; Target site: lipid bilayer
XWGRRCCGWGPGRRYCVRWC

SEQ ID NO: 482 - protein, 35 aa, Brassica napus
  REGION 1..35: note = "Antibacterial, Antifungal"; --NA--; Target site- Lipid Bilayer
PPIQNPSMAPPTQNPYGQPMTPPTQNPYGQPMAPP

SEQ ID NO: 483 - protein, 64 aa, Medicago truncatula
  REGION 1..64: note = "Antibacterial, Antifungal"; Nodule-specific cysteine-rich peptide; Target site- Lipid Bilayer
RLNTTFRPLNFKMLRFWGQNRNIMKHRGQKVHFSLILSDCKTNKDCPKLRRANVRCRKSYCVPI

SEQ ID NO: 484 - protein, 41 aa, Taraxacum officinale
  REGION 1..41: note = "Antibacterial, Antifungal"; --NA--; "Target site- Lipid Bilayer, Shows broad-spectrum antifungal activity against important phytopathog"
GYGDGCYSEDDLSVCCKKKFKVIGKCFKSVRECQNSGCKYH

SEQ ID NO: 485 - protein, 47 aa, Vigna radiata
  REGION 1..47: note = "Antibacterial, Antifungal"; Defensin; Target site- Lipid Bilayer; These are identified as good candidates for development of natural add
KTCENLANTYRGPCFTTGSCDDHCKNKEHLRSGRCRDDFRCWCTRNC

SEQ ID NO: 486 - protein, 35 aa, Stellaria media
  REGION 1..35: note = "Antibacterial, Antifungal"; "Hevein, Chitin-binding"; Target site- Lipid Bilayer; It exhibits potent antifungal activity against important plant pathoge
VGPGGECGGRFGGCAGGQCCSRFGFCGSGPKYCAH

SEQ ID NO: 487 - protein, 98 aa, Triticum aestivum
  REGION 1..98: note = Triticum aestivum, Aegilops tauschii; "Antibacterial, Antifungal"; Puroindoline-B; Target site: lipid bilayer
EVGGGGGSQQCPQERPKLSSCKDYVMERCFTMKDFPVTWPTKWWKGGCEHEVREKCCKQLSQIAPQCRCDSIRRVIQGRLGGFLGIWRGEVFKQLQRA

SEQ ID NO: 488 - protein, 90 aa, Cycas revoluta
  REGION 1..90: note = "Antibacterial, Antifungal"; Defensin; Target site- Lipid Bilayer
AVTCNTVVSSLAPCVPFFAGSAAQPTAACCNGVRSLNSAARTTPDRRTACNCIKSSASSIGLNYNKAAKLPSRCTVNVTVPISPSVNCAT

SEQ ID NO: 489 - protein, 71 aa, Saccharum officinarum
  REGION 1..71: note = "Antibacterial, Antifungal"; Defensin; Target site- Lipid Bilayer
HTPTPTPICKSRSHEYKGRCIQDMDCNAACVKESESYTGGFCNGRPPFKQCFCTKPCKRERAAATLRWPGL

SEQ ID NO: 490 - protein, 51 aa, Saccharum officinarum
  REGION 1..51: note = "Antibacterial, Antifungal"; Defensin; Target site- Lipid Bilayer
RHRHCFSQSHKFVGACLRESNCENVCKTEGFPSGECKWHGIVSKCHCKRIC

SEQ ID NO: 491 - protein, 49 aa, Saccharum officinarum
  REGION 1..49: note = "Antibacterial, Antifungal"; Defensin; Target site- Lipid Bilayer
RYCLSQSHRFKGLCMSSSNCANVCQTENFPGGECKADGATRKCFCKKIC

SEQ ID NO: 492 - protein, 20 aa, Tulipa gesneriana
  REGION 1..20: note = "Antibacterial, Antifungal"; Thionin; Target site- Lipid Bilayer; Shows high antimicrobial activity by binding to chitin in a reversible
KSCCRNTTARNCYNVCRIPG

SEQ ID NO: 493 - protein, 55 aa, Psidium guajava
  REGION 1..55: note = "Antibacterial, Antifungal"; Glycine-rich antimicrobial peptide Pg-AMP; "Target site: lipid bilayer; Shows highest antibacterial activity, revealing that it might act by f"
RESPSSRMECYEQAERYGYGGYGGGRYGGGYGSGRGQPVGQGVERSHDDNRNQPR

SEQ ID NO: 494 - protein, 52 aa, Spinacia oleracea
  REGION 1..52: note = "Antibacterial, Antifungal"; Defensin; Target site: lipid bilayer
GIFSSRKCKTPSKTFKGICTRDSNCDTSCRYEGYPAGDCKGIRRRCMCSKPC

SEQ ID NO: 495 - protein, 46 aa, Vigna angularis
  REGION 1..46: note = "Antibacterial, Antifungal"; Defensin; Target site- Lipid Bilayer
KTCMTKKEGWGRCLIDTTCAHSCRKQGYKGGNCKGMRRTCYCLLDC

SEQ ID NO: 496 - protein, 35 aa, Echinochloa crus-galli
  REGION 1..35: note = Echinochloa crus-galli; "Antibacterial, Antifungal"; Hairpin-like peptide; Target site- Lipid Bilayer
GADRCRERCERRHRGDWQGKQRCLMECRRREQEED

SEQ ID NO: 497 - protein, 37 aa, Psychotria leptothyrsa
  REGION 1..37: note = "Antibacterial, Antifungal"; Defensin; Target site- Lipid Bilayer; These are identified as good candidates for development of natural add
ACIKNGGRCVASGGPPYCCSNYCLQIAGQSYGVCKKH

SEQ ID NO: 498 - protein, 42 aa, Taraxacum officinale
  REGION 1..42: note = "Antibacterial, Antifungal"; Cysteine rich peptides; Target site- Lipid Bilayer
ANKCIIDCMKVKTTCGDECKGAGFKTGGCALPPDIMKCCHNC

SEQ ID NO: 499 - protein, 44 aa, Triticum kiharae
  REGION 1..44: note = Triticum kiharae, Triticum aestivum, Aegilops tauschii; "Antibacterial, Antifungal"; Hevein; Target site- Lipid Bilayer
AQRCGDQARGAKCPNCLCCGKYGFCGSGDAYCGAGSCQSQCRGC

SEQ ID NO: 500 - protein, 44 aa, Taraxacum officinale
  REGION 1..44: note = "Antibacterial, Antifungal"; Cysteine rich peptides; Target site- Lipid Bilayer
GGKCTVDWGGQGGGRRLPSPLFCCYKPTRICYLNQETCETETCP

SEQ ID NO: 501 - protein, 50 aa, Nigella sativa
  REGION 1..50: note = "Antibacterial, Antifungal"; Defensin; Target site- Lipid Bilayer
KFCEKPSGTWSGVCGNSGACKDQCIRLEGAKHGSCNYKLPAHRCICYYEC

SEQ ID NO: 502 - protein, 47 aa, Lens culinaris
  REGION 1..47: note = "Antibacterial, Antifungal"; Defensin; Target site- Lipid Bilayer
KTCENLSDSFKGPCIPDGNCNKHCKEKEHLLSGRCRDDFRCWCTRNC

SEQ ID NO: 503 - protein, 38 aa, Taraxacum officinale
  REGION 1..38: note = "Antibacterial, Antifungal"; Cysteine rich peptides; Target site- Lipid Bilayer
VAKCTEESGGKYFVFCCYKPTRICYMNEQKCESTCIGK

SEQ ID NO: 504 - protein, 44 aa, Cycas revoluta
  REGION 1..44: note = "Antibacterial, Antifungal"; Defensin; "Target site- Lipid Bilayer; inhibits growth of plant pathogenic fungi, Gram positive, Shows high a"
KGAPCAKKPCCGPLGHYKVDCSTIPDYPCCSKYGFCGSGPQYCG

SEQ ID NO: 505 - protein, 44 aa, Cycas revoluta
  REGION 1..44: note = "Antibacterial, Antifungal"; Defensin; "Target site- Lipid Bilayer; inhibits growth of plant pathogenic fungi, Gram positive, Shows high a"
KGGPCAKKPCCGPLGHYKVDCSTIPDYPCCSKYGFCGSGPQYCG

SEQ ID NO: 506 - protein, 7 aa, Jatropha curcas
  REGION 1..7: note = "Antibacterial, Antifungal"; Defensin; "Target site: lipid bilayer, active Gram-negative bacterium Pseudomonas aeruginosa (MIC=64 micro-g/mL), "
KVFLGLK

SEQ ID NO: 507 - protein, 49 aa, Clitoria ternatea
  REGION 1..49: note = "Antibacterial, Antifungal"; Defensin; Target site: lipid bilayer
NLCERASLTWTGNCGNTGHCDTQCRNWESAKHGACHKRGNWKCFCYFNC

SEQ ID NO: 508 - protein, 38 aa, Spinacia oleracea
  REGION 1..38: note = "Antibacterial, Antifungal"; Defensin; "Target site: lipid bilayer , is active against Fusarium spp., Gram-positive and Gram-negative bact"
GIFSSRKCKTPSKTFKGYCTRDSNCDTSCRYEGYPAGD

SEQ ID NO: 509 - protein, 50 aa, Dahlia merckii
  REGION 1..50: note = "Antibacterial, Antifungal"; Defensin; "Target site: lipid bilayer, Dahlia merckii defensin AMP1. Cysteine-rich antimicrobial protein 1, A"
ELCEKASKTWSGNCGNTGHCDNQCKSWEGAAHGACHVRNGKHMCFCYFNC

SEQ ID NO: 510 - protein, 26 aa, Tulipa gesneriana
  REGION 1..26: note = "Antibacterial, Antifungal"; Thionin; Target site- Lipid Bilayer/ Shows high antimicrobial activity by binding to chitin in a reversible
TPRPVCAATCDCKIITGTKCPPGYEK

SEQ ID NO: 511 - protein, 40 aa, Fagopyrum esculentum
  REGION 1..40: note = "Antibacterial, Antifungal"; "Chitin-binding, Hevein"; Target site: lipid bilayer
AQCGAQGGGQTCPGGLCCSQWGWCGSTPKYCGAGCQSNCR

SEQ ID NO: 512 - protein, 45 aa, Macadamia integrifolia
  REGION 1..45: note = "Antibacterial, Antifungal"; Vicilin; Target site: lipid bilayer
RQRDPQQQYEQCQERCQRHETEPRHMQTCQQRCERRYEKEKRKQQ

SEQ ID NO: 513 - protein, 47 aa, Macadamia integrifolia
  REGION 1..47: note = "Antibacterial, Antifungal"; Vicilin; Target site: lipid bilayer
RQRDPQQQYEQCQERCQRHETEPRHMQTCQQRCERRYEKEKRKQQKR

SEQ ID NO: 514 - protein, 67 aa, Macadamia integrifolia
  REGION 1..67: note = "Antibacterial, Antifungal"; Vicilin; Target site: lipid bilayer
RQRDPQQQYEQCQERCQRHETEPRHMQTCQQRCERRYEKEKRKQQKRYEEQQREDEEKYEERMKEED

SEQ ID NO: 515 - protein, 66 aa, Solanum tuberosum
  REGION 1..66: note = "Antibacterial, Antifungal"; Snakin; Target site- Lipid Bilayer
YSYKKIDCGGACAARCRLSSRPRLCNRACGTCCARCNCVPPGTSGNTETCPCYASLTTHGNKRKCP

SEQ ID NO: 516 - protein, 38 aa, Capsella bursa-pastoris
  REGION 1..38: note = Capsella bursa-pastoris; "Antibacterial, Antifungal"; Shepherin family; Target site: lipid bilayer
GYHGGHGGHGGGYNGGGGHGGHGGGYNGGGHHGGGGHG

SEQ ID NO: 517 - protein, 47 aa, Pyrularia pubera
  REGION 1..47: note = "Antibacterial, Antifungal"; Thionin; Target site: lipid bilayer; is toxic to animal cells; is active against Gram-negative and Gram-pos
KSCCRNTWARNCYNVCRLPGTISREICAKKCDCKIISGTTCPSDYPK

SEQ ID NO: 518 - protein, 44 aa, Phyllostachys pubescens
  REGION 1..44: note = "Antibacterial, Antifungal"; "Chitin-binding, Thionin"; "Target site: lipid bilayer , inhibits growth of plant patogenic fungi"
KSCCRSTQARNIYNAPRFAGGSRPLCALGSGCKIVDDKKTPPND

SEQ ID NO: 519 - protein, 40 aa, Fagopyrum esculentum
  REGION 1..40: note = "Antibacterial, Antifungal"; "Chitin-binding, Hevein, Defensin"; Target site: lipid bilayer ; Shows antibacterial and antifungal activity in different species.
AQCGAQGGGATCPGGLCCSQWGWCGSTPKYCGAGCQSNCK

SEQ ID NO: 520 - protein, 46 aa, Tulipa gesneriana
  REGION 1..46: note = "Antibacterial, Antifungal"; "Chitin-binding, Thionin"; "inhibits growth of plant patogenic fungi (IC50=2 micro-g/ml), and different bacteria (IC50=11-20 micro-g/ml)"
KSCCRNTVARNCYNVCRIPGTPRPVCAATCDCKLITGTKCPPGYEK

SEQ ID NO: 521 - protein, 47 aa, Petunia hybrida
  REGION 1..47: note = "Antibacterial, Antifungal"; Defensin; "may have antimicrobial activity,Target site: lipid bilayer"
ATCKAECPTWDSVCINKKPCVACCKKAKFSDGHCSKILRRCLCTKEC

SEQ ID NO: 522 - protein, 50 aa, Aesculus hippocastanum
  REGION 1..50: note = "Antibacterial, Antifungal"; Defensin; "is active against fungi, Target site: lipid bilayer"
LCNERPSQTWSGNCGNTAHCDKQCQDWEKASHGACHKRENHWKCFCYFNC

SEQ ID NO: 523 - protein, 24 aa, Spinacia oleracea
  REGION 1..24: note = "Antibacterial, Antifungal"; Defensin; --NA--
MFFSSKKCKTVXKTFRGPCVRNAN

SEQ ID NO: 524 - protein, 12 aa, Capsicum annuum
  REGION 1..12: note = "Antibacterial, Antifungal"; Hevein; It has inhibited the growth of phytopathogenic bacteria and a fungus.
EYCGAGCQSNCR

SEQ ID NO: 525 - protein, 13 aa, Capsicum annuum
  REGION 1..13: note = "Antibacterial, Antifungal"; Hevein; It has inhibited the growth of phytopathogenic bacteria and a fungus.
EYCGAGCQSNCRR

SEQ ID NO: 526 - protein, 13 aa, Capsicum annuum
  REGION 1..13: note = "Antibacterial, Antifungal"; Hevein; It has inhibited the growth of phytopathogenic bacteria and a fungus.
LCCSQFGFCGTTR

SEQ ID NO: 527 - protein, 67 aa, Nicotiana attenuata
  REGION 1..67: note = "Antibacterial, Antifungal"; avian Defensin; Shows potent antimicrobial activity
MTQFNIPVTMSSSLSIILVILVSLRTALSSFGLCRLRRGFCARGRCRFPSIPIGRCSRFVQCCRRVW

SEQ ID NO: 528 - protein, 5 aa, Capsicum annuum
  REGION 1..5: note = "Antibacterial, Antifungal"; Hevein; It has inhibited the growth of phytopathogenic bacteria and a fungus.
VCANR

SEQ ID NO: 529 - protein, 18 aa, Capsicum annuum
  REGION 1..18: note = "Antibacterial, Antifungal"; Hevein; It has inhibited the growth of phytopathogenic bacteria and a fungus.
VCANRLCCSQFGFCGTTR

SEQ ID NO: 530 - protein, 22 aa, Spinacia oleracea
  REGION 1..22: note = Spinacia oleracea v. Matador; "Antibacterial, Antifungal"; Defensin; Shows antibacterial and antifungal activity. Inhibition of fungal growth by permeabilization of th
XTCESPSHKFKGPCATNRNCES

SEQ ID NO: 531 - protein, 40 aa, Fagopyrum esculentum
  REGION 1..40: note = "Antibacterial, Antifungal"; "Defensin, Hevein"; "Shows antibacterial and antifungal activity in different species, inhibits growth of plant patogen"
AQCGAQGGGATCPGGLCCSQWGWCGSTPKYCGAGCQSNCR

SEQ ID NO: 532 - protein, 91 aa, Leonurus artemisia
  REGION 1..91: note = "Antibacterial, Antifungal"; Lipid-transfer protein; --NA--
AIGCNTVASKMAPCLPYVTGKGPLGGCCGGVKGLIDAARTTPDRQAVCNCLKTLAKSYSGINLGNAAGLPGKCGVSIPYQISPNTDCSKVH

SEQ ID NO: 533 - protein, 46 aa, Tulipa gesneriana
  REGION 1..46: note = "Antibacterial, Antifungal"; Thionin; --NA--
KSCCRNTTARNCYNVCRIPGTPRPVCAATCDCKIITGTKCPPGYEK

SEQ ID NO: 534 - protein, 42 aa, Hordeum vulgare
  REGION 1..42: note = "Antibacterial, Antifungal"; Thionin; --NA--
KSCCRSTLGRNCYNLCRVRGAQKLCAGVCRCKLTSSGKCPTG

SEQ ID NO: 535 - protein, 45 aa, Phyllostachys pubescens
  REGION 1..45: note = "Antibacterial, Antifungal"; Thionin; --NA--
KSCCRSTTARNIYNGCRVPGTARVPCAKKSGCKIQEAKKCEPPYD

SEQ ID NO: 536 - protein, 91 aa, Phaseolus aureus
  REGION 1..91: note = Phaseolus aureus, Vigna radiata; "Antibacterial, Antifungal"; Lipid-transfer protein; --NA--
MTCGQVQGNLAQCIGFLQKGGVVPPSCCTGVKNILNSSRTTADRRAVCSCLKAAAGAVRGINPNNAEALPGKCGVNIPYKISTSTNCNSIN

SEQ ID NO: 537 - protein, 45 aa, Euonymus europaeus
  REGION 1..45: note = "Antibacterial, Antifungal"; Hevein; These are identified as good candidates for development of natural additives to prevent food spoil
QQCGRQAGNRRCANNLCCSQYGYCGRTNEYCCTSQGCQSQCRRCG

SEQ ID NO: 538 - protein, 37 aa, Mirabilis jalapa
  REGION 1..37: note = "Antibacterial, Antifungal"; Knottin; Shown to possess strong antifungal activity
QCIGNGGRCNENVGPPYCCSGFCLRQPGQGYGYCKNR

SEQ ID NO: 539 - protein, 90 aa, Hordeum vulgare
  REGION 1..90: note = "Antibacterial, Antifungal"; Lipid-transfer protein; Target site: lipid bilayer
AISCGQVSSALSPCISYARGNGAKPPAACCSGVKRLAGAAQSTADKQAACKCIKSAAGGLNAGKAAGIPSMCGVSVPYAISASVDCSKIR

SEQ ID NO: 540 - protein, 90 aa, Hordeum vulgare
  REGION 1..90: note = "Antibacterial, Antifungal"; Lipid-transfer protein; Target site: lipid bilayer
AITCGQVSSALGPCAAYAKGSGTSPSAGCCSGVKRLAGLARSTADKQATCRCLKSVAGAYNAGRAAGIPSRCGVSVPYTISASVDCSKIH

SEQ ID NO: 541 - protein, 35 aa, Macadamia integrifolia
  REGION 1..35: note = "Antibacterial, Antifungal"; Vicilin; Target site: lipid bilayer
KRDPQQREYEDCRRRCEQQEPRQQYQCQRRCREQQ

SEQ ID NO: 542 - protein, 41 aa, Macadamia integrifolia
  REGION 1..41: note = "Antibacterial, Antifungal"; Vicilin; "Target site: lipid bilayer; Participate in the innate immune response of plants, therapeutically u"
DPQTDCQQCQRRCRQQESGPRQQQYCQRRCKEICEEEEEYN

SEQ ID NO: 543 - protein, 49 aa, Macadamia integrifolia
  REGION 1..49: note = "Antibacterial, Antifungal"; Vicilin; "Participate in the innate immune response of plants, therapeutically useful as anticancer agents a"
ESEFDRQEYEECKRQCMQLETSGQMRRCVSQCDKRFEEDIDWSKYDNQD

SEQ ID NO: 544 - protein, 38 aa, Phytolacca americana
  REGION 1..38: note = "Antibacterial, Antifungal"; Knottin; possesses antifungal activity; Target site- Lipid Bilayer
AGCIKNGGRCNASAGPPYCCSSYCFQIAGQSYGVCKNR

SEQ ID NO: 545 - protein, 20 aa, Impatiens balsamina
  REGION 1..20: note = "Antibacterial, Antifungal"; Impatiens family; plays a role in the defense of the germinating seed against microorganisms by inhibiting the growt
QWGRRCCGWGPGRRYCVRWC

SEQ ID NO: 546 - protein, 46 aa, Beta vulgaris
  REGION 1..46: note = "Antibacterial, Antifungal"; Defensin; --NA--
ATCRKPSMYFSGACFSDTNCQKACNREDWPNGKCLVGFKCECQRPC

SEQ ID NO: 547 - protein, 46 aa, Beta vulgaris
  REGION 1..46: note = "Antibacterial, Antifungal"; Defensin; AX proteins are involved in antifungal defense.
AICKKPSKFFKGACGRDADCEKACDQENWPGGVCVPFLRCECQRSC

SEQ ID NO: 548 - protein, 40 aa, Wasabia japonica
  REGION 1..40: note = "Antibacterial, Antifungal"; Hevein; "Participate in the innate immune response of plants, therapeutically useful as anticancer agents a"
QAGGQTCPGGICCSQWGYCGTTADYCSPNNNCQSNCWASG

SEQ ID NO: 549 - protein, 30 aa, Amaranthus caudatus
  REGION 1..30: note = Amaranthus caudatus, Amaranthus hypochondriacus; "Antibacterial, Antifungal, Alpha-amylase-inhibitor"; Hevein; "is active against numerous chitin-containing fungal pathogenes and Gram-positive bacteria, It stro"
VGECVRGRCPSGMCCSQFGYCGKGPKYCGR

SEQ ID NO: 550 - protein, 54 aa, Heuchera sanguinea
  REGION 1..54: note = "Antibacterial, Antifungal, Antibiofilm"; Defensin; Heuchera sanguinea antifungal protein 1. Defensin AFP1. Cysteine-rich antifungal protein 1. Defens
DGVKLCDVPSGTWSGHCGSSSKCSQQCKDREHFAYGGACHYQFPSVKCFCKRQC

SEQ ID NO: 551 - protein, 11 aa, Cocos nucifera
  REGION 1..11: note = "Antibacterial, Antifungal, Antimicrobial"; --NA--; Target site: lipid bilayer ; These show remarkable potential to contribute in the development of n
TESYFVFSVGM

SEQ ID NO: 552 - protein, 49 aa, Benincasa hispida
  REGION 1..49: note = "Antibacterial, Antifungal, Antioxidant"; Cationic; Target site- Lipid Bilayer; Shows potent inhibitory effects against various human bacterial and fu
SDYLNNNPLFPRYDIGNVELSTAYRSFANQKAPGRLNQNWALTADYTYR

SEQ ID NO: 553 - protein, 31 aa, Ziziphus jujuba
  REGION 1..31: note = "Antibacterial, Antifungal, Antioxidant, Enzyme-inhibitor"; Snakin; Shows antimicrobial activity. Human red blood cells also shows good tolerance to the Snakin-Z. Hen
CARLNCVPKGTSGNTETCPCYASLHSCRKYG

SEQ ID NO: 554 - protein, 30 aa, Echinochloa crus-galli
  REGION 1..30: note = Echinochloa crus-galli; "Antibacterial, Antifungal, Anti-protist"; Lipid-transfer protein; --NA--
AISCGQVSSAIGPCLSYARGQGSAPSAGCC

SEQ ID NO: 555 - protein, 29 aa, Viola odorata
  REGION 1..29: note = "Antibacterial, Antifungal, Antiviral"; Cyclotide; participates in a plant defense mechanism.
ICGETCVGGTCNTPGCSCSWPVCTRNGLP

SEQ ID NO: 556 - protein, 30 aa, Viola odorata
  REGION 1..30: note = "Antibacterial, Antifungal, Antiviral"; Cyclotide; --NA--
CAESCVYIPCTVTALLGCSCSNRVCYNGIP

SEQ ID NO: 557 - protein, 30 aa, Viola odorata
  REGION 1..30: note = "Antibacterial, Antifungal, Antiviral"; Cyclotide; --NA--
CESCVWIPCISSVVGCSCKSKVCYKNGTLP

SEQ ID NO: 558 - protein, 30 aa, Viola odorata
  REGION 1..30: note = "Antibacterial, Antifungal, Antiviral"; Cyclotide; --NA--
CGESCVWIPCISAVGCSCKSKVCYKNGTLP

SEQ ID NO: 559 - protein, 31 aa, Viola odorata
  REGION 1..31: note = "Antibacterial, Antifungal, Antiviral"; Cyclotide; --NA--
CGESCVWIPCISAVVGCSCKSKVCYKNGTLP

SEQ ID NO: 560 - protein, 30 aa, Viola odorata
  REGION 1..30: note = "Antibacterial, Antifungal, Antiviral"; Cyclotide; --NA--
CGESCVWIPCISSAIGCSCKNKVCYRNGIP

SEQ ID NO: 561 - protein, 30 aa, Viola odorata
  REGION 1..30: note = "Antibacterial, Antifungal, Antiviral"; Cyclotide; --NA--
CGESCVWIPCISSAVGCSCKNKVCYKNGTP

SEQ ID NO: 562 - protein, 30 aa, Viola odorata
  REGION 1..30: note = "Antibacterial, Antifungal, Antiviral"; Cyclotide; --NA--
CGESCVWIPCLTSAIGCSCKSKVCYRNGIP

SEQ ID NO: 563 - protein, 30 aa, Viola odorata
  REGION 1..30: note = "Antibacterial, Antifungal, Antiviral"; Cyclotide; --NA--
CGESCVWIPCLTSAVGCSCKSKVCYRNGIP

SEQ ID NO: 564 - protein, 30 aa, Viola odorata
  REGION 1..30: note = "Antibacterial, Antifungal, Antiviral"; Cyclotide; --NA--
CGESCVWIPCTITALAGCKCKSKVCYNSIP

SEQ ID NO: 565 - protein, 30 aa, Viola odorata
  REGION 1..30: note = "Antibacterial, Antifungal, Antiviral"; Cyclotide; --NA--
CGESCVYIPCLTSAVGCSCKSKVCYRNGIP

SEQ ID NO: 566 - protein, 30 aa, Viola odorata
  REGION 1..30: note = "Antibacterial, Antifungal, Antiviral"; Cyclotide; --NA--
GIPCGESCVWIPCLTSAIGCSCKSKVCYKD

SEQ ID NO: 567 - protein, 30 aa, Viola odorata
  REGION 1..30: note = "Antibacterial, Antifungal, Antiviral"; Cyclotide; --NA--
GIPCGESCVWIPGISAAIGCSCKNKVCYRN

SEQ ID NO: 568 - protein, 31 aa, Viola odorata
  REGION 1..31: note = "Antibacterial, Antifungal, Antiviral"; Cyclotide; --NA--
GIPCGESCVYIIPCTVTALAQCKCKSKVCYN

SEQ ID NO: 569 - protein, 20 aa, Phaseolus vulgaris
  REGION 1..20: note = "Antibacterial, Antifungal, Antiviral"; Defensin; Inhibit proliferation in leukemia cell lines L1210 and M1 and breast cancer cell line MCF-7. It re
KTCENLADTYKGPCFTSGGD

SEQ ID NO: 570 - protein, 29 aa, Viola odorata
  REGION 1..29: note = "Antibacterial, Antifungal, Antiviral"; Cyclotide; Shown to possess insecticidal and enzymatic digestion activity; participates in plant defense mech
GLPVCGETCVTGSCYTPGCTCSWPVCTRN

SEQ ID NO: 571 - protein, 30 aa, Viola odorata
  REGION 1..30: note = "Antibacterial, Antifungal, Antiviral, Anticancer"; Cyclotide; --NA--
CGESCVWIPCISSAIGCSCKSKVCYRNGIP

SEQ ID NO: 572 - protein, 20 aa, Phaseolus lunatus
  REGION 1..20: note = "Antibacterial, Antifungal, Antiviral, Anticancer, Anti-HIV"; Defensin; Inhibited proliferation in the breast cancer cell line MCF-7. It reduced the activity of HIV-1 rev
KTCENLADTFRGPCFATSNC

SEQ ID NO: 573 - protein, 29 aa, Oldenlandia affinis
  REGION 1..29: note = Oldenlandia affinis, Viola yedoensis; "Antibacterial, Antifungal, Antiviral, Anticancer, Hemolytic, Cytotoxic, Nematocide, Molluscicidal,"; Cyclotide; The Kalata B1 showed significant activity in inhibiting development of nematode larvae and motilit
GLPVCGETCVGGTCNTPGCTCSWPVCTRN

SEQ ID NO: 574 - protein, 40 aa, Ginkgo biloba
  REGION 1..40: note = "Antibacterial, Antifungal, Antiviral, Anti-HIV"; --NA--; --NA--
ANTAFVSSAHNTQKIPAGAPFNRNLRAMLADLRQNAAFAG

SEQ ID NO: 575 - protein, 10 aa, Vigna unguiculata
  REGION 1..10: note = Vigna unguiculata subsp.sesquipedalis; "Antibacterial, Antifungal, Antiviral, Anti-HIV, Anticancer"; Defensin; Target site: lipid bilayer ; It shows antifungal and antibacterial activity and inhibit the growth
KTCENLADTY

SEQ ID NO: 576 - protein, 30 aa, Viola odorata
  REGION 1..30: note = "Antibacterial, Antifungal, Antiviral, Antiparasitic"; Cyclotide; --NA--
GLPCGETTCFTGKCYTPGCSCSYPICKKIN

SEQ ID NO: 577 - protein, 31 aa, Viola odorata
  REGION 1..31: note = "Antibacterial, Antifungal, Antiviral, Insecticidal, Enzymatic-degradation"; Cyclotide; "Shown to possess insecticidal and enzymatic digestion activity, participates in a plant defense me"
GTLPCGESCVWIPCISSVVGCSCKSKVCYKD

SEQ ID NO: 578 - protein, 30 aa, Viola odorata
  REGION 1..30: note = "Antibacterial, Antifungal, Antiviral, Nematocide, Anti-HIV, Hemolytic, Enzymatic-degradation"; Cyclotide; Showed significant activity in motility of adult worms; and also anti-HIV and hemolytic activity.;
GLPTCGETCFGGTCNTPGCTCDPWPVCTHN

SEQ ID NO: 579 - protein, 76 aa, Macadamia integrifolia
  REGION 1..76: note = "Antibacterial, Antifungal, Antiyeast"; "Beta-Barrelin, Defensin"; Target site- Lipid Bilayer
SAFTVWSGPGCNNRAERYSKCGCSAIHQKGGYDFSYTGQTAALYNQAGCSGVAHTRFGSSARACNPFGWKSIFIQC

SEQ ID NO: 580 - protein, 40 aa, Ipomoea nil
  REGION 1..40: note = Ipomoea nil, Pharbitis nil; "Antibacterial, Antifungal, Antiyeast"; Hevein; --NA--
QQCGRQASGRLCGNRLCCSQWGYCGSTASYCGAGCQSQCR

SEQ ID NO: 581 - protein, 41 aa, Ipomoea nil
  REGION 1..41: note = Ipomoea nil, Pharbitis nil; "Antibacterial, Antifungal, Antiyeast"; Hevein; --NA--
QQCGRQASGRLCGNRLCCSQWGYCGSTASYCGAGCQSQCRS

SEQ ID NO: 582 - protein, 45 aa, Triticum aestivum
  REGION 1..45: note = "Antibacterial, Antifungal, Antiyeast, Toxin"; Thionin; is toxic to animal cells
KSCCKSTLGRNCYNLCRARGAQKLCANVCRCKLTSGLSCPKDFPK

SEQ ID NO: 583 - protein, 30 aa, Viola abyssinica
  REGION 1..30: note = "Antibacterial, Antifungal, Cytotoxic"; Cyclotide; Shows potent cytotoxic activity in cancer cells; Target site- Lipid Bilayer; Participate in the in
GLPVCGETCFGGTCNTPGCTCDPWPVCTRN

SEQ ID NO: 584 - protein, 50 aa, Pinus sylvestris
  REGION 1..50: note = "Antibacterial, Antifungal, Enzyme-inhibitor"; Defensin; Target site- Lipid Bilayer
RMCKTPSGKFKGYCVNNTNCKNVCRTEGFPTGSCDFHVAGRKCYCYKPCP

SEQ ID NO: 585 - protein, 28 aa, Capsella bursa-pastoris
  REGION 1..28: note = Capsella bursa-pastoris; "Antibacterial, Antifungal, Hemolytic"; Shepherin family; Shows more potent antifungal activity and has a potential for use in topical application. Cell int
GYGGHGGHGGHGGHGGHGGHGHGGGGHG

SEQ ID NO: 586 - protein, 37 aa, Mirabilis jalapa
  REGION 1..37: note = "Antibacterial, Antifungal, Hemolytic, Cytotoxic"; --NA--; Target site: lipid bilayer; 6% Killing against Human endothelial cells at 500 micro-g/ml; 2% killing ag
XCIGNGGRCNENVGPPYCCSGFCLRQPGQGYGYCKNR

SEQ ID NO: 587 - protein, 51 aa, Raphanus sativus
  REGION 1..51: note = Raphanus sativus, Sinapis alba, Brassica juncea, Brassica rapa subsp. pkinensis; "Antibacterial, Antifungal, Hemolytic, Cytotoxic"; Defensin; "Target site: lipid bilayer; Not active up to 500 micro-g/ml against Human endothelial cells, Human fibr"
XKLCERPSGTWSGVCGNNNACKNQCINLEKARHGSCNYVFPAHKCICYFPC

SEQ ID NO: 588 - protein, 20 aa, Impatiens balsamina
  REGION 1..20: note = "Antibacterial, Antifungal, Hemolytic, Cytotoxic"; --NA--; Target site: lipid bilayer; 0% Hemolysis against Human erythrocytes at 200 micro-g/ml
XWGRRCCGWGPGRRYCRRWC

SEQ ID NO: 589 - protein, 93 aa, Allium cepa
  REGION 1..93: note = "Antibacterial, Antifungal, Hemolytic, Cytotoxic"; Lipid-transfer protein; Target site: lipid bilayer ; Not active up to 200 micro-g/ml against Human erythrocytes and Human fibro
QNICPRVNRIVTPCVAYGLGRAPIAPCCRALNDLRFVNTRNLRRAACRCLVGVVNRNPGLRRNPRFQNIPRDCRNTFVRPFWWRPRIQCGRIN

SEQ ID NO: 590 - protein, 36 aa, Mirabilis jalapa
  REGION 1..36: note = "Antibacterial, Antifungal, Hemolytic, Cytotoxic"; Knottin; Target site: lipid bilayer; 5% Killing against Human endothelial cells at 500 micro-g/ml; 2% killing ag
CIGNGGRCNENVGPPYCCSGFCLRQPNQGYGVCRNR

SEQ ID NO: 591 - protein, 30 aa, Chassalia parvifolia
  REGION 1..30: note = "Antibacterial, Antifungal, Hemolytic, Cytotoxic, Anti-HIV"; Cyclotide; Shows haemolytic activity against Gram-positive bacteria; circulin A shown to possess some anti-ba
GIPCGESCVWIPCISAALGCSCKNKVCYRN

SEQ ID NO: 592 - protein, 31 aa, Chassalia parvifolia
  REGION 1..31: note = "Antibacterial, Antifungal, Hemolytic, Cytotoxic, Antiviral, Insecticidal, Anti-HIV"; Cyclotide; "Circulin B shown to possess some anti-bacterial and anti-HIV activity, Target site: lipid bilayer;"
GVIPCGESCVFIPCISTLLGCSCKNKVCYRN

SEQ ID NO: 593 - protein, 31 aa, Psychotria longipes
  REGION 1..31: note = "Antibacterial, Antifungal, Hemolytic, Cytotoxic, Neurotensin-inhibitor"; Cyclotide; inhibits the cytopathic effects and replication of the human immunodeficiency virus; is active aga
SIPCGESCVFIPCTVTALLGCSCKSKVCYKN

SEQ ID NO: 594 - protein, 20 aa, Picea sitchensis
  REGION 1..20: note = "Antibacterial, Antifungal, Nematocide"; --NA--; Target site: lipid bilayer; shows 1% Hemolysis against Human erythrocytes at 125 micro-g/ml; shows 6% H
KSLRPRCWIKIKFRCKSLKF

SEQ ID NO: 595 - protein, 17 aa, Picea sitchensis
  REGION 1..17: note = "Antibacterial, Antifungal, Nematocide"; --NA--; Target site: lipid bilayer; shows 1% Hemolysis against Human erythrocytes at 125 micro-g/ml; shows 5% H
RPRCWIKIKFRCKSLKF

SEQ ID NO: 596 - protein, 31 aa, Viola hederacea
  REGION 1..31: note = "Antibacterial, Antiviral, Antifungal"; Cyclotide; Target site: lipid bilayer
CGESCAXISFCFTEVIGCSCKNKVCYLNSIS

SEQ ID NO: 597 - protein, 31 aa, Viola hederacea
  REGION 1..31: note = "Antibacterial, Antiviral, Antifungal, Nematocide, Anti-HIV"; Cyclotide; Target site: lipid bilayer; shows 50% Hemolysis against Human erythrocytes at 55.2  1.5 micro-M
SISCGESCAMISFCFTEVIGCSCKNKVCYLN

SEQ ID NO: 598 - protein, 30 aa, Oldenlandia affinis
  REGION 1..30: note = "Antibacterial, Cytotoxic, Anti-HIV"; Cyclotide; "Shown to possess anti-bacterial, cytotoxic and anti-HIV activity."
GFPCGESCVYVPCLTAAIGCSCSNKVCYKN

SEQ ID NO: 599 - protein, 20 aa, Impatiens balsamina
  REGION 1..20: note = "Antibacterial, Hemolytic, Cytotoxic, Antifungal"; Impatiens family; plays a role in the defense of the germinating seed agasnst microorganisms by inhibiting the growt
QWGRRCCGWGPGRRYCRRWC

SEQ ID NO: 600 - protein, 32 aa, Palicourea rigida
  REGION 1..32: note = "Antibacterial, Insecticidal"; Cyclotide; Target site- Lipid Bilayer; 41% Hemolysis & 28% Hemolysis against Human erythrocytes at 40 micro-M & 20
GGSVPCGESCVFIPCITSLAGCSCKNKVCYYD

SEQ ID NO: 601 - protein, 45 aa, Triticum aestivum
  REGION 1..45: note = "Antibacterial, Toxin"; Thionin; is toxic to animal cells
KSCCRSTLGRNCYNLCRARGAQKLCAGVCRCKISSGLSCPKGFPK

SEQ ID NO: 602 - protein, 7 aa, Citrus medica
  REGION 1..7: note = "Antibiotic, Anti-inflammatory, Cytotoxic"; Orbitide; "Shown to possesss antibiotic, anti-inflammatory and cytotoxic activity."
GDLVTYF

SEQ ID NO: 603 - protein, 8 aa, Citrus medica
  REGION 1..8: note = "Antibiotic, Anti-inflammatory, Cytotoxic"; Orbitide; "Shown to possesss antibiotic, anti-inflammatory and cytotoxic activity."
PWLIAAGL

SEQ ID NO: 604 - protein, 32 aa, Hedyotis diffusa
  REGION 1..32: note = Anticancer; Cyclotide; --NA--
GAFLKCGESCVYLPCLTTVVGCSCQNSVCYRD

SEQ ID NO: 605 - protein, 31 aa, Hedyotis diffusa
  REGION 1..31: note = Anticancer; Cyclotide; --NA--
GAVPCGETCVYLPCITPDIGCSCQNKVCYRD

SEQ ID NO: 606 - protein, 32 aa, Chassalia curviflora
  REGION 1..32: note = Anticancer; Cyclotide; --NA--
GIPCAESCVWIPPCTITALMGCSCKNNVCYNN

SEQ ID NO: 607 - protein, 30 aa, Hedyotis diffusa
  REGION 1..30: note = Anticancer; Cyclotide; --NA--
GTSCGETCVLLPCLSSVLGCTCQNKRCYKD

SEQ ID NO: 608 - protein, 46 aa, Viscum album
  REGION 1..46: note = Anticancer; Thionin; --NA--
KSCCPNTTGRNIYNTCRFGGGSRQVCASLSGCKIISASTCPSDYPK

SEQ ID NO: 609 - protein, 46 aa, Viscum album
  REGION 1..46: note = Anticancer; Thionin; --NA--
KSCCPNTTGRNIYNTCRLTGSSRETCAKLSGCKIISASTCPSNYPK

SEQ ID NO: 610 - protein, 7 aa, Citrus unshiu
  REGION 1..7: note = Anticancer; Orbitide; Shown to possess anti-tumoural activity.
LIATGTF

SEQ ID NO: 611 - protein, 8 aa, Annona glabra
  REGION 1..8: note = Anticancer; Orbitide; Shown to possess anticancer activity.
PMVAVYGT

SEQ ID NO: 612 - protein, 7 aa, Citrus natsudaidai
  REGION 1..7: note = Citrus natsudaidai, Citrus sinensis; Anticancer; Orbitide; Shown to possess anti-tumoural activity.
PAPFWGG

SEQ ID NO: 613 - protein, 8 aa, Citrus natsudaidai
  REGION 1..8: note = Citrus natsudaidai, Citrus sinensis; Anticancer; Orbitide; Shown to possess anti-tumoural activity.
PEAEWGEV

SEQ ID NO: 614 - protein, 8 aa, Goniothalamus griffithii
  REGION 1..8: note = Anticancer; Orbitide; Shown to possess anti-tumour activity.
PIFPPGLP

SEQ ID NO: 615 - protein, 7 aa, Citrus natsudaidai
  REGION 1..7: note = Citrus natsudaidai, Citrus sinensis; Anticancer; Orbitide; Shown to possess anti-tumoural activity.
PLLPYGS

SEQ ID NO: 616 - protein, 9 aa, Leonurus japonicus
  REGION 1..9: note = Anticancer; Orbitide; Showed potent anticancer activity.
PPPYPPMIG

SEQ ID NO: 617 - protein, 9 aa, Leonurus japonicus
  REGION 1..9: note = Anticancer; Orbitide; Showed potent anticancer activity.
PPPYPPMIG

SEQ ID NO: 618 - protein, 6 aa, Annona glabra
  REGION 1..6: note = Anticancer; Orbitide; Shown to possess anticancer activity.
PGLVIY

SEQ ID NO: 619 - protein, 8 aa, Annona glabra
  REGION 1..8: note = Anticancer; Orbitide; Shown to possess anticancer activity.
PGYVLALV

SEQ ID NO: 620 - protein, 7 aa, Annona glabra
  REGION 1..7: note = Anticancer; Orbitide; Shown to possess anticancer activity.
PPVYGPE

SEQ ID NO: 621 - protein, 30 aa, Viola arvensis
  REGION 1..30: note = Viola arvensis, Viola tricolor; Anticancer; Varv peptide H; Target site: lipid bilayer
GLPVCGETCFGGTCNTPGCSCXTWPVCSRN

SEQ ID NO: 622 - protein, 29 aa, Viola tricolor
  REGION 1..29: note = Anticancer; Cyclotide; Target site: lipid bilayer; shows 50% Hemolysis against Human erythrocytes at 225.90 micro-M
GYPICGESCVGGICNIPGCSCSWPVCTTN

SEQ ID NO: 623 - protein, 29 aa, Oldenlandia affinis
  REGION 1..29: note = Anticancer; Cyclic Peptide; Target site- Lipid Bilayer; 100% Hemolysis against Human erythrocytes at >500 micro-g/ml
PICKRNGLPVCGETCTLGTCYTQGCTCSW

SEQ ID NO: 624 - protein, 29 aa, Oldenlandia affinis
  REGION 1..29: note = Anticancer; Cyclic Peptide; Target site- Lipid Bilayer; 100% Hemolysis against Human erythrocytes at >500 micro-g/ml
PICTRNGLPVCGETCFGGTCNTPGCTCTW

SEQ ID NO: 625 - protein, 29 aa, Oldenlandia affinis
  REGION 1..29: note = Anticancer; Cyclic Peptide; Target site- Lipid Bilayer; 100% Hemolysis against Human erythrocytes at >500 micro-g/ml
PVCTRNGLPVCGETCVGGTCNTPGCTCSW

SEQ ID NO: 626 - protein, 9 aa, Leonurus heterophyllus
  REGION 1..9: note = Anticancer; --NA--; shows cell growth inhibitory activity against p-388 lymphocytic leukemia cells (IC50 = 6.0 micro-g/ml)
GPPPYPPMI

SEQ ID NO: 627 - protein, 5 aa, Aster tataricus
  REGION 1..5: note = Anticancer; --NA--; is active against mouse Sarcoma 180 ascites
PTSFT

SEQ ID NO: 628 - protein, 5 aa, Amaranthus hypochondriacus
  REGION 1..5: note = Anticancer; Lunasin-like or bioactive; Shows anticarcinogenic properties
HIMQK

SEQ ID NO: 629 - protein, 29 aa, Viola arvensis
  REGION 1..29: note = Anticancer; Cyclotide; Shows innate immune defense mechanism to treat infections caused by pathogenic bacteria to animals
GLPCVGETCVGGTCNTPGCSCSWPVCTRN

SEQ ID NO: 630 - protein, 47 aa, Phoradendron tomentosum
  REGION 1..47: note = Anticancer; Thionin; Shows innate immune defense mechanism to treat infections caused by pathogenic bacteria to animals
KSCCPTTTARNIYNTCRFGGGSRPICAKLSGCKIISGTKCDSNGWDH

SEQ ID NO: 631 - protein, 47 aa, Phoradendron tomentosum
  REGION 1..47: note = Anticancer; Thionin; Shows innate immune defense mechanism to treat infections caused by pathogenic bacteria to animals
KSCCPTTTARNIYNTCRFGGGSRPICAKLSGCKIISGTKCDSNGWTH

SEQ ID NO: 632 - protein, 46 aa, Phoradendron tomentosum
  REGION 1..46: note = Anticancer; Thionin; Shows innate immune defense mechanism to treat infections caused by pathogenic bacteria to animals
KSCCPTTTARNIYNTCRFGGGSRPVCAKLSGCKIISGTKCDSGHDH

SEQ ID NO: 633 - protein, 47 aa, Phoradendron tomentosum
  REGION 1..47: note = Anticancer; Thionin; Shows innate immune defense mechanism to treat infections caused by pathogenic bacteria to animals
KSCCPTTTARNIYNTCRFGGGSRPVCAKLSGCKIISGTKCDSNGHNH

SEQ ID NO: 634 - protein, 8 aa, Gynura pseudochina
  REGION 1..8: note = Anticancer; Bioactive peptides; It inhibit human gastric cancer cells (KATO-III) with a greater inhibitory effect without signific
LNCCNLLL

SEQ ID NO: 635 - protein, 43 aa, Glycine max
  REGION 1..43: note = Anticancer; --NA--; It contains multiple functional domains that can modulate gene expression through effects on histo
SKWQHQQDSCRKQLQGVNLTPCEKHIMEKIQGRGDDDDDDDDN

SEQ ID NO: 636 - protein, 9 aa, Glycine max
  REGION 1..9: note = Anticancer; --NA--; Showing highest antimicrobial and antihypertensive activity.
XMLPSYSPY

SEQ ID NO: 637 - protein, 12 aa, Amaranthus hypochondriacus
  REGION 1..12: note = Anticancer; Lunasin-like or bioactive; Shows anticarcinogenic properties
QLQGVNLTPCEK

SEQ ID NO: 638 - protein, 9 aa, Amaranthus hypochondriacus
  REGION 1..9: note = Anticancer; Lunasin-like or bioactive; Shows anticarcinogenic properties
WQHQQDSCR

SEQ ID NO: 639 - protein, 10 aa, Amaranthus hypochondriacus
  REGION 1..10: note = Anticancer; Lunasin-like or bioactive; Shows anticarcinogenic properties
WQHQQDSCRK

SEQ ID NO: 640 - protein, 46 aa, Viscum album
  REGION 1..46: note = Anticancer; Thionin; Shows innate immune defense mechanism to treat infections caused by pathogenic bacteria to animals
KSCCPNTTGRNIYNTCRFGGGSREVCARISGCKIISASTCPSDYPK

SEQ ID NO: 641 - protein, 46 aa, Viscum coloratum
  REGION 1..46: note = "Anticancer, Anticancer, Antimicrobial"; Thionin; possesses antitumor activity against rat osteoblast sarcoma.
KSCCKNTTGRNIYNTCRFAGGSRERCAKLSGCKIISASTCPSDYPK

SEQ ID NO: 642 - protein, 47 aa, Nicotiana alata
  REGION 1..47: note = "Anticancer, Antifungal"; Cyclotide; Target site- Lipid Bilayer
RTCESQSHRFKGPCARDSNCATVCLTEGFSGGDCRGFRRRCFCTRPC

SEQ ID NO: 643 - protein, 47 aa, Nicotiana alata
  REGION 1..47: note = "Anticancer, Antifungal, Insecticidal"; Defensin; "may have antimicrobial activity,Target site: lipid bilayer ; This is biologically active against i"
RECKTESNTFPGICITKPPCRKACISEKFTDGHCSKILRRCLCTKPC

SEQ ID NO: 644 - protein, 31 aa, Viola biflora
  REGION 1..31: note = "Anticancer, Antimicrobial"; Cyclotide; "Showed significant potency in cytotoxicity, participates in a plant defense mechanism."
GTIPCGESCVFIPCLTSALGCSCKSKVCYKN

SEQ ID NO: 645 - protein, 31 aa, Viola tricolor
  REGION 1..31: note = Viola tricolor, Viola biflora, Psychotria leptothyrsa; "Anticancer, Antimicrobial"; Cyclotide; Target site: lipid bilayer; participates in a plant defense mechanism.; Showed significant potency
GTFPCGESCVFIPCLTSAIGCSCKSKVCYKN

SEQ ID NO: 646 - protein, 30 aa, Viola biflora
  REGION 1..30: note = Viola biflora, Gloeospermum pauciflorum; "Anticancer, Antimicrobial"; Cyclotide; Target site: lipid bilayer; Showed significant potency in cytotoxicity.; participates in a plant d
GIPCAESCVWIPCTVTALIGCGCSNKVCYN

SEQ ID NO: 647 - protein, 31 aa, Viola biflora
  REGION 1..31: note = Viola biflora, Psychotria leptothyrsa; "Anticancer, Antimicrobial"; Cyclotide; Target site: lipid bilayer; Showed significant potency in cytotoxicity.; participates in a plant d
GLLPCAESCVYIPCLTTVIGCSCKSKVCYKN

SEQ ID NO: 648 - protein, 29 aa, Viola biflora
  REGION 1..29: note = "Anticancer, Antimicrobial"; Cyclotide; "Target site: lipid bilayer, Showed significant potency in cytotoxicity., participates in a plant d"
GLPVCGETCFGGRCNTPGCTCSYPICTRN

SEQ ID NO: 649 - protein, 29 aa, Viola tricolor
  REGION 1..29: note = Viola tricolor, Viola ignobilis; "Anticancer, Antimicrobial, Cytotoxic"; Cyclotide; Target site- Lipid Bilayer; 50% Cell death against Mouse fibroblasts L929 at 270 micro-M; Induces apopt
GLPLCGETCVGGTCNTPGCSCGWPVCVRN

SEQ ID NO: 650 - protein, 30 aa, Viola philippica
  REGION 1..30: note = "Anticancer, Antimicrobial, Cytotoxic"; Cyclotide; Target site- Lipid Bilayer; Shown to possess highly cytotoxic activity against cancer cell lines.
GIPCGESCVFIPCISSVIGCSCSSKVCYRN

SEQ ID NO: 651 - protein, 29 aa, Viola abyssinica
  REGION 1..29: note = "Anticancer, Antimicrobial, Cytotoxic"; Cyclotide; "Target site- Lipid Bilayer, Shows potent cytotoxic activity in cancer cells."
GLPVCGETCAGGTCNTPGCSCSWPICTRN

SEQ ID NO: 652 - protein, 31 aa, Viola philippica
  REGION 1..31: note = "Anticancer, Antimicrobial, Cytotoxic"; Cyclotide; Target site- Lipid Bilayer; Shown to possess highly cytotoxic activity against cancer cell lines.
GSIPCGESCVFIPCISAVIGCSCSNKVCYKN

SEQ ID NO: 653 - protein, 31 aa, Viola philippica
  REGION 1..31: note = "Anticancer, Antimicrobial, Cytotoxic"; Cyclotide; Shown to possess highly cytotoxic activity against cancer cell lines.; Target site- Lipid Bilayer;
GSIPCGESCVFIPCISSVIGCACKSKVCYKN

SEQ ID NO: 654 - protein, 30 aa, Viola arvensis
  REGION 1..30: note = Viola arvensis, Viola biflora, Viola tricolor; "Anticancer, Antimicrobial, Cytotoxic"; Cyclotide; Target site: lipid bilayer; shows 50% Hemolysis against Human erythrocytes at 8.91 micro-M; Vitri A sho
GIPCGESCVWIPCITSAIGCSCKSKVCYRN

SEQ ID NO: 655 - protein, 29 aa, Viola arvensis
  REGION 1..29: note = Viola arvensis, Viola tricolor; "Anticancer, Antimicrobial, Enzymatic-degradation"; Cyclotide; "participates in a plant defense mechanism.,Target site: lipid bilayer, Resist enzymatic degradatio"
GLPICGETCVGGSCNTPGCSCSWPVCTRN

SEQ ID NO: 656 - protein, 43 aa, Glycine max
  REGION 1..43: note = "Anticancer, Antioxidant, Anti-inflammatory"; --NA--; "Lunasin possesses inherent antioxidative, anti-inflammatory, anticancerous properties and also pla"
SKWQHQQDSCRKQKQGVNLTPCEKHIMEKIQGRGDDDDDDDDD

SEQ ID NO: 657 - protein, 8 aa, Annona squamosa
  REGION 1..8: note = "Anticancer, Antiparasitic"; Orbitide; Showed significant anti-tumour and anti-parasitic activity.
PMTAIVGY

SEQ ID NO: 658 - protein, 29 aa, Melicytus chathamicus
  REGION 1..29: note = "Anticancer, Cytotoxic"; Cyclotide; Shows cytotoxocity against cancer cell lines and low toxicity against red blood cells. /Target sit
GLPTCGETCTLGKCNTPKCTCNWPICYKD

SEQ ID NO: 659 - protein, 29 aa, Melicytus chathamicus
  REGION 1..29: note = "Anticancer, Cytotoxic"; Cyclotide; Shows cytotoxocity against cancer cell lines and low toxicity against red blood cells./ Target sit
GLPTCGETCTLGKCNTPKCTCNWPICYKN

SEQ ID NO: 660 - protein, 31 aa, Viola philippica
  REGION 1..31: note = "Anticancer, Cytotoxic"; Cyclotide; Shown to possess highly cytotoxic activity against cancer cell lines. /Target site- Lipid Bilayer;
GSIPCGESCVFIPCISAIIGCSCSNKVCYKN

SEQ ID NO: 661 - protein, 25 aa, Psychotria leptothyrsa
  REGION 1..25: note = "Anticancer, Cytotoxic"; Cyclotide; Target site- Lipid Bilayer; Shows potent cytotoxic activity in cancer cells.
KLCGETCFKFKCYTPGCSCSYPFCK

SEQ ID NO: 662 - protein, 30 aa, Viola odorata
  REGION 1..30: note = "Anticancer, Cytotoxic"; Cyclotide; Shows antitumor effects and causes cell death by membrane permeabilization
GIACGESCVWIPCISSAIGCSCVKSKCYRN

SEQ ID NO: 663 - protein, 30 aa, Clitoria ternatea
  REGION 1..30: note = "Anticancer, Cytotoxic"; Cyclotide; Shows innate immune defense mechanism to treat infections caused by pathogenic bacteria to animals
GIPCGESCVYIPCITAAIGCSCKSKVCYRN

SEQ ID NO: 664 - protein, 27 aa, Psychotria leptothyrsa
  REGION 1..27: note = "Anticancer, Cytotoxic"; Cyclotide; Shows antitumor effects and causes cell death by membrane permeabilization
KLCGETCFKFKCYTPGCSCSCSYPFCK

SEQ ID NO: 665 - protein, 28 aa, Psychotria leptothyrsa
  REGION 1..28: note = "Anticancer, Cytotoxic"; Cyclotide; "Shows antitumor effects and causes cell death by membrane permeabilization, Shows potent cytotoxic"
GIACGESCVFLGCFIPGCSCKSKVCYFN

SEQ ID NO: 666 - protein, 31 aa, Psychotria leptothyrsa
  REGION 1..31: note = "Anticancer, Cytotoxic"; Cyclotide; Shows antitumor effects and causes cell death by membrane permeabilization; Shows potent cytotoxic
GVIPCGESCVFIPCISSVLGCSCKNKVCYRD

SEQ ID NO: 667 - protein, 31 aa, Viola philippica
  REGION 1..31: note = "Anticancer, Cytotoxic, Antimicrobial"; Cyclotide; Target site- Lipid Bilayer; Shows innate immune defense mechanism to treat infections caused by pa
GSIPCGESCVFIPCISAIIGCSCSSKVCYKN

SEQ ID NO: 668 - protein, 29 aa, Viola tricolor
  REGION 1..29: note = Viola tricolor, Viola baoshanensis, Viola philippica; "Anticancer, Cytotoxic, Antimicrobial"; Cyclotide; "Shown to possess cytotoxic activity, Target site- Lipid Bilayer; Human foreskin fibroblasts HFF-1("
GLPVCGETCVGGTCNTPGCACSWPVCTRN

SEQ ID NO: 669 - protein, 31 aa, Viola philippica
  REGION 1..31: note = "Anticancer, Cytotoxic, Antimicrobial"; Cyclotide; Shows innate immune defense mechanism to treat infections caused by pathogenic bacteria to animals
GSIPCEGSCVFIPCISAIIGCSCSNKVCYKN

SEQ ID NO: 670 - protein, 29 aa, Viola baoshanensis
  REGION 1..29: note = Viola baoshanensis, Viola philippica; "Anticancer, Cytotoxic, Antimicrobial"; Cyclotide; Shown to possess cytotoxic activity.; Shows innate immune defense mechanism to treat infections ca
GLPVCGETCVGGTCNTPGCGCSWPVCTRN

SEQ ID NO: 671 - protein, 29 aa, Viola tricolor
  REGION 1..29: note = "Anticancer, Cytotoxic, Enzymatic-degradation, Antimicrobial"; Cyclotide; Shown to possess enzymatic degradation and highly cytotoxic activity against cancer cell lines.
GLPICGETCVGGTCNTPGCFCTWPVCTRN

SEQ ID NO: 672 - protein, 29 aa, Viola tricolor
  REGION 1..29: note = "Anticancer, Cytotoxic, Enzymatic-degradation, Antimicrobial"; Cyclotide; "Shown to possess enzymatic degradation and highly cytotoxic activity against cancer cell lines., T"
GLPVCGETCFTGSCYTPGCSCNWPVCNRN

SEQ ID NO: 673 - protein, 29 aa, Viola tricolor
  REGION 1..29: note = "Anticancer, Cytotoxic, Enzymatic-degradation, Antimicrobial"; Cyclotide; Target site: lipid bilayer; shows 50% Hemolysis against Human erythrocytes at 27.06 micro-M; Shown to p
GLPVCGETCVGGTCNTPGCSCSWPVCFRN

SEQ ID NO: 674 - protein, 31 aa, Viola tricolor
  REGION 1..31: note = "Anticancer, Cytotoxic, Enzymatic-degradation, Antimicrobial"; Cyclotide; "possesses cancer cell toxicity,Shown to possess enzymatic degradation and highly cytotoxic activit"
GTLPCGESCVWIPCISSVVGCACKSKVCYKD

SEQ ID NO: 675 - protein, 30 aa, Viola arvensis
  REGION 1..30: note = Viola arvensis, Viola tricolor; "Anticancer, Enzymatic-degradation, Antimicrobial"; Cyclotide; "Target site: lipid bilayer; shows 50% Hemolysis against Human erythrocytes at 7.52 micro-M, Resist enzy"
GLPVCGETCFGGTCNTPGCSCETWPVCSRN

SEQ ID NO: 676 - protein, 8 aa, Santalum album
  REGION 1..8: note = "Anticancer, Hemolytic, Cytotoxic"; Cyclic Peptide; Target site- Lipid Bilayer; Not active up to 1000 micro-g/ml- Mouse fibroblasts L929
RLGDGCTR

SEQ ID NO: 677 - protein, 8 aa, Glycine max
  REGION 1..8: note = "Anticancer, Immunomodulatory"; Bioactive peptides; Significantly stimulated the proliferation of splenocytes of mice
AEINMPNY

SEQ ID NO: 678 - protein, 6 aa, Phaseolus vulgaris
  REGION 1..6: note = "Anticancer, Immunomodulatory"; Bioactive peptides; Most commonly used as immunomodulatory and anticancer peptides
GEGSGA

SEQ ID NO: 679 - protein, 5 aa, Phaseolus vulgaris
  REGION 1..5: note = "Anticancer, Immunomodulatory"; Bioactive peptides; Most commonly used as immunomodulatory and anticancer peptides
GLTSK

SEQ ID NO: 680 - protein, 6 aa, Glycine max
  REGION 1..6: note = "Anticancer, Immunomodulatory"; Bioactive peptides; Showed a stimulatory effect on the phagocytic ability of human polymorphonuclear leukocytes and pr
HCQRPA

SEQ ID NO: 681 - protein, 5 aa, Glycine max
  REGION 1..5: note = "Anticancer, Immunomodulatory"; Bioactive peptides; Significantly stimulated the proliferation of splenocytes of mice
IQQGN

SEQ ID NO: 682 - protein, 5 aa, Phaseolus vulgaris
  REGION 1..5: note = "Anticancer, Immunomodulatory"; Bioactive peptides; Most commonly used as immunomodulatory and anticancer peptides
LSGNK

SEQ ID NO: 683 - protein, 7 aa, Phaseolus vulgaris
  REGION 1..7: note = "Anticancer, Immunomodulatory"; Bioactive peptides; Most commonly used as immunomodulatory and anticancer peptides
MPACGSS

SEQ ID NO: 684 - protein, 5 aa, Phaseolus vulgaris
  REGION 1..5: note = "Anticancer, Immunomodulatory"; Bioactive peptides; Most commonly used as immunomodulatory and anticancer peptides
MTEEY

SEQ ID NO: 685 - protein, 5 aa, Glycine max
  REGION 1..5: note = "Anticancer, Immunomodulatory"; Bioactive peptides; Significantly stimulated the proliferation of splenocytes of mice
SGFAP

SEQ ID NO: 686 - protein, 29 aa, Clitoria ternatea
  REGION 1..29: note = "Anticancer, Insecticidal, Hemolytic, Anthelmintic, Antibacterial, Cytotoxic"; Cyclotide; Target site: lipid bilayer; shows 50% Hemolysis against Human erythrocytes at 13.1 micro-M; Shows innat
GLPTCGETCTLGTCYVPDCSCSWPICMKN

SEQ ID NO: 687 - protein, 30 aa, Clitoria ternatea
  REGION 1..30: note = "Anticancer, Insecticidal, Hemolytic, Anthelmintic, Antibacterial, Cytotoxic"; Cyclotide; Target site: lipid bilayer; shows 50% Hemolysis against Human erythrocytes at 8.4 micro-M; Shown to pos
GIPCGESCVFIPCITAAIGCSCKSKVCYRN

SEQ ID NO: 688 - protein, 46 aa, Phoradendron liga
  REGION 1..46: note = "Anticancer, Toxin"; Thionin; "Target site: lipid bilayer, DNA / RNA; Shows innate immune defense mechanism to treat infections c"
KSCCPSTTARNIYNTCRLTGASRSVCASLSGCKIISGSTCDSGWNH

SEQ ID NO: 689 - protein, 41 aa, Phoradendron tomentosum
  REGION 1..41: note = "Anticancer, Toxin"; Thionin; Shows innate immune defense mechanism to treat infections caused by pathogenic bacteria to animals
KSCCPTTTARNIYNTCRFGGGSRPICAKLSGCKIISGTKCD

SEQ ID NO: 690 - protein, 46 aa, Phoradendron tomentosum
  REGION 1..46: note = "Anticancer, Toxin"; Thionin; Shows innate immune defense mechanism to treat infections caused by pathogenic bacteria to animals
KSCCPTTTARNIYNTCRLAGGSRPICAKLSGCKIISGTKCDSGWDH

SEQ ID NO: 691 - protein, 46 aa, Viscum album
  REGION 1..46: note = "Anticancer, Toxin"; Thionin; Shows innate immune defense mechanism to treat infections caused by pathogenic bacteria to animals
KSCCPNTTGRNIYNTCRFAGGSRERCAKLSGCKIISASTCPSDYPK

SEQ ID NO: 692 - protein, 37 aa, Glycine max
  REGION 1..37: note = Glycine max, Pisum sativum; "Antidiabetic, Enzyme-inhibitor"; Bioactive peptides; "Increase insulin receptor signaling pathway in the skeletal muscle , induces intracellular Ca2 inc"
ASCNGVCSPFEMPPCGSSACRCIPVGLVVGYCRHPSG

SEQ ID NO: 693 - protein, 59 aa, Capsicum annuum
  REGION 1..59: note = Antifungal; Thionin; --NA--
KEICCKELTKPVKCSSDPLCQKLCMEKEKYEDGHCFTILSKCLCMKRCNAKTLATELLA

SEQ ID NO: 694 - protein, 50 aa, Salix alba
  REGION 1..50: note = Antifungal; Defensin; --NA--
KLCERPSGTWSGVCGNNNACKNQCINLEKARHGSCNYVFPAHKCICYFPC

SEQ ID NO: 695 - protein, 50 aa, Arabidopsis thaliana
  REGION 1..50: note = Antifungal; Defensin; --NA--
KLCERPSGTWSGVCGNSNACKNQCINLEKARHGSCNYVFPAHKCICYFPC

SEQ ID NO: 696 - protein, 50 aa, Brassica rapa
  REGION 1..50: note = Subsp. Chinensis; Antifungal; Defensin; --NA--
KLCERSSGTWSGVCGNNNACKNQCINLEGARHGSCNYVFPYHRCICYFPC

SEQ ID NO: 697 - protein, 50 aa, Salix alba
  REGION 1..50: note = Antifungal; Defensin; --NA--
KLCQRPSGTWSGVCGNNNACKNQCINLEKARHGSCNYVFPAHKCICYFPC

SEQ ID NO: 698 - protein, 51 aa, Arabidopsis halleri
  REGION 1..51: note = Antifungal; Defensin; --NA--
QRLCEKPSGTWSGVCGNNGACRNQCIRLEKARHGSCNYVFPAHKCICYFPC

SEQ ID NO: 699 - protein, 68 aa, Macadamia integrifolia
  REGION 1..68: note = Antifungal; --NA--; --NA--
RQRDPQQQYEQCQKHCQRRETEPRHMQTCQQRCERRYEKEKRKQQKRYEEQQREDEEKYEERMKEEDN

SEQ ID NO: 700 - protein, 41 aa, Macadamia integrifolia
  REGION 1..41: note = Antifungal; --NA--; --NA--
DPQTECQQCQRRCRQQESGPRQQQYCQRRCKEICEEEEEYN

SEQ ID NO: 701 - protein, 35 aa, Coffea canephora
  REGION 1..35: note = Antifungal; --NA--; --NA--
GNEGGGHGGHGGYGGYHHHGGGGGGYGGYHGGGGS

SEQ ID NO: 702 - protein, 98 aa, Hordeum vulgare
  REGION 1..98: note = Antifungal; --NA--; --NA--
AAKMAKNVDKPLFTATFNVQASSADYATFIAGIRNKLRNPAHFSHNEPVLPPVEPNVPPSRWFHVVLKASPTSAGLTLAIRADNIYLEGFKSSDGTWW

SEQ ID NO: 703 - protein, 98 aa, Hordeum vulgare
  REGION 1..98: note = Antifungal; --NA--; --NA--
AAKMAKNVDKPLFTATFNVQASSADYATFIAGIRNKLRNPAHFSHNRPVLPPVEPNVPPSRWFHVVLKASPTSAGLTLAIRADNIYLEGFKSSDGTWW

SEQ ID NO: 704 - protein, 98 aa, Zea mays
  REGION 1..98: note = Antifungal; Thaumatin; --NA--
AAVFTVVNQCPFTVWAASVPVGGGRQLNRGESWRITAPAGTTAARIWARTGCKFDASGRGSCRTGDCGGVLQCTGYGRAPNTLAEYALKQFNNLDFFD

SEQ ID NO: 705 - protein, 25 aa, Glycine max
  REGION 1..25: note = Antifungal; --NA--; --NA--
ADPTFGFTPLGLSEKANLQIMKAYD

SEQ ID NO: 706 - protein, 98 aa, Spatholobus parviflorus
  REGION 1..98: note = Antifungal; --NA--; --NA--
AEETSFVFSKFKPLEPNLILQGDALVTVAGVLQLTNVDKNGVPEPSSLGRATYSAPINIWDSATGLVASFATSFRFTIYAPNIATIADGLAFFLAPVA

SEQ ID NO: 707 - protein, 98 aa, Spatholobus parviflorus
  REGION 1..98: note = Antifungal; --NA--; --NA--
AEETSFVFSKFKPLEPNLILQGDALVTVAGVLQLTNVDSNGVPEPSSLGRATYSAPINIWDSATGLVASFATSFRFTIYAPNIATIADGLAFFLAPVA

SEQ ID NO: 708 - protein, 98 aa, Castanea sativa
  REGION 1..98: note = Antifungal; Thaumatin; --NA--
AKITFTNNCPRTIWPGTLTSDQKPQLPNTGFVLASKASLTLGVQAPWKGRFWARTRCTTNSGKFTCETADCSTGQVACNGNGAIPPASLVEINIAANR

SEQ ID NO: 709 - protein, 43 aa, Raphanus sativus
  REGION 1..43: note = Antifungal; --NA--; --NA--
ALSCGTVNSNLAACIGYLTQNAPLARGCCTGVTNLNNMAXTTP

SEQ ID NO: 710 - protein, 17 aa, Lippia sidoides
  REGION 1..17: note = Antifungal; --NA--; --NA--
ALYNSEDLYEETSDSDD

SEQ ID NO: 711 - protein, 30 aa, Phaseolus vulgaris
  REGION 1..30: note = Antifungal; Thaumatin; --NA--
ANFEIVNNCPYTVWAAASPGGGRRLDRGQT

SEQ ID NO: 712 - protein, 98 aa, Ginkgo biloba
  REGION 1..98: note = Antifungal; --NA--; --NA--
ANTAFVSSACNTQKIPSGSPFNRNLRAMLADLRQNTAFSGYDYKTSRAGSGGAPTAYGRATCKQSISQSDCTACLSNLVNRIFSICNNAIGARVQLVD

SEQ ID NO: 713 - protein, 98 aa, Arachis diogoi
  REGION 1..98: note = Antifungal; Thaumatin; --NA--
AQITLTNKCSYTVWPGSQANANSAQLSTTGFELPTGQSKTVDVPAPWSGKFWARTGCSNNNGVFSCATADCGNHLECSGAGEATPASLMEFTIASNGG

SEQ ID NO: 714 - protein, 37 aa, Linum usitatissimum
  REGION 1..37: note = Antifungal; Thaumatin; --NA--
ARFDIQNKCPYTVWAASVPVGGGRQLNSGQTWXIDAP

SEQ ID NO: 715 - protein, 30 aa, Diospyros texana
  REGION 1..30: note = Antifungal; --NA--; --NA--
ATFDIQNKXTYTVWAAAWAPSYPGGXKQLD

SEQ ID NO: 716 - protein, 98 aa, Solanum lycopersicum
  REGION 1..98: note = Antifungal; Thaumatin; --NA--
ATFEVRNNCPYTVWAASTPIGGGRRLDRGQTWVINAPRGTKMARIWGRTNCNFDGDGRGSCQTGDCGGVLQCTGWGKPPNTLAEYALDQFSNLDFWDI

SEQ ID NO: 717 - protein, 98 aa, Actinidia deliciosa
  REGION 1..98: note = Antifungal; Thaumatin; --NA--
ATFNIINNCPFTVWAAAVPGGGKRLDRGQNWIINPGAGTKGARVWPRTGCNFDGAGRGKCQTGDCNGLLQCQAFGQPPNTLAEYALNQFNNLDFFDIS

SEQ ID NO: 718 - protein, 98 aa, Avena sativa
  REGION 1..98: note = Antifungal; Thaumatin; --NA--
ATFRITNNCGFTVWPAGIPVGGGFQLNSKQSSNINVPAGTSAGRIWGRTGCSFNNGRGSCATGDCAGALSCTLSGQPATLAEYTIGGSQDFYDISVID

SEQ ID NO: 719 - protein, 98 aa, Avena sativa; identical to SEQ ID NO: 718
  REGION 1..98: note = Antifungal; Thaumatin; --NA--

SEQ ID NO: 720 - protein, 98 aa, Avena sativa; identical to SEQ ID NO: 718
  REGION 1..98: note = Antifungal; Thaumatin; --NA--

SEQ ID NO: 721 - protein, 40 aa, Calotropis procera
  REGION 1..40: note = Antifungal; Thaumatin; --NA--
ATFTIRNNCPYTIWAAAVPGGGRRLNSGGTWTINVAPGTA

SEQ ID NO: 722 - protein, 39 aa, Hevea brasiliensis
  REGION 1..39: note = Antifungal; Thaumatin; --NA--
ATFTIRNNXPYTVWAAASPGGGRRLDMARIWGRTNXNFD

SEQ ID NO: 723 - protein, 98 aa, Avena sativa
  REGION 1..98: note = Antifungal; Thaumatin; --NA--
ATFTITNNCGYTVWPAAIPVGGGQQLDQGQTWTLNVPAGTNSGRIWGRTGCSFNGGSGSCQTGDCAGALSCTLSGQPATLAEFSIGGEHDYYDISVID

SEQ ID NO: 724 - protein, 37 aa, Hordeum vulgare
  REGION 1..37: note = Antifungal; Thaumatin; --NA--
ATFTVINKCQYTVWAAAVPAGGGQKLDAGQTWSIXXP

SEQ ID NO: 725 - protein, 98 aa, Solanum lycopersicum
  REGION 1..98: note = Antifungal; Thaumatin; --NA--
ATIEVRNNCPYTVWAASTPIGGGRRLNRGQTWVINAPRGTKMARIWGRTGCNFNAAGRGTCQTGDCGGVLQCTGWGKPPNTLAEYALDQFSNLDFWDI

SEQ ID NO: 726 - protein, 17 aa, Cassia didymobotrya
  REGION 1..17: note = Antifungal; Thaumatin; --NA--
ATITFTNKCTRTVWPGG

SEQ ID NO: 727 - protein, 44 aa, Hordeum vulgare
  REGION 1..44: note = Antifungal; Thaumatin; --NA--
ATITVVNRCSYTVWPGALPGGGVRLDPGQRWALNMPAGTAGAAV

SEQ ID NO: 728 - protein, 98 aa, Zea mays
  REGION 1..98: note = Antifungal; Thaumatin; --NA--
AVFTVVNQCPFTVWAASVPVGGGRQLNRGESWRITAPAGTTAARIWARTGCQFDASGRGSCRTGDCGGVVQCTGYGRAPNTLAEYALKQFNNLDFFDI

SEQ ID NO: 729 - protein, 91 aa, Vitis cinerea
  REGION 1..91: note = Vitis cinerea var. helleri x Vitis riparia; Antifungal; --NA--; --NA--
AYSKTFLLVGLLFAVVLILSSEVSARDLAETSQTQVSVEDAKYGGYGRGYGHGKGHGYQKGHGHGKPGHGGPGHPPGHGGAGEAVEEGTQN

SEQ ID NO: 730 - protein, 22 aa, Stellaria media
  REGION 1..22: note = Antifungal; --NA--; --NA--
CKHQCMSTRGDQARKICESVCM

SEQ ID NO: 731 - protein, 14 aa, Stellaria media
  REGION 1..14: note = Antifungal; --NA--; --NA--
CMSTRGDQARKICE

SEQ ID NO: 732 - protein, 22 aa, Moringa oleifera
  REGION 1..22: note = Antifungal; --NA--; --NA--
CPAIQRCCQQLRNIQPPCRCCQ

SEQ ID NO: 733 - protein, 47 aa, Solanum tuberosum
  REGION 1..47: note = Antifungal; --NA--; --NA--
DICTNCCAGTKGCNTTSANGAFICEGQSDPKKPKACPLNCDPHIAYA

SEQ ID NO: 734 - protein, 98 aa, Dendrobium findlayanum
  REGION 1..98: note = Antifungal; --NA--; --NA--
DNHLLPGERLNPGNFLKQDRYMLIMQEDCNLVLYNLNKPEWATKTANQGSRCFVTLQSDGNFVIYDEHEQEGRNEAIWASKTDGENGNYVIILQKDGN

SEQ ID NO: 735 - protein, 37 aa, Malva parviflora
  REGION 1..37: note = Antifungal; --NA--; --NA--
DRQIDMEEQQLEKLNKQDRXPGLRYAAKQQMXTXRMG

SEQ ID NO: 736 - protein, 14 aa, Arachis hypogaea
  REGION 1..14: note = Antifungal; --NA--; --NA--
DSLSFSYNNFEEDD

SEQ ID NO: 737 - protein, 98 aa, Arabidopsis thaliana
  REGION 1..98: note = Antifungal; --NA--; --NA--
EQCGRQAGGALCPNGLCCSEFGWCGNTEPYCKQPGCQSQCTPGGTPPGPTGDLSGIISSSQFDDMLKHRNDAACPARGFYTYNAFITAAKSFPGFGTT

SEQ ID NO: 738 - protein, 98 aa, Secale cereale
  REGION 1..98: note = Antifungal; --NA--; --NA--
EQCGSQAGGATCPNCLCCSRFGWCGSTSDYCGDGCQSQCAGCGGGGTPVTPTPTPSGGGGVSSIVSRALFDRMLLHRNDGACQAKGFYTYDAFVAAAG

SEQ ID NO: 739 - protein, 15 aa, Astragalus mongholicus
  REGION 1..15: note = Antifungal; --NA--; --NA--
ESGINLQGDATLANN

SEQ ID NO: 740 - protein, 30 aa, Passiflora alata
  REGION 1..30: note = Antifungal; --NA--; --NA--
GAGSQEERMQGQMEGQDFSHEERFLSMVRE

SEQ ID NO: 741 - protein, 25 aa, Nigella sativa
  REGION 1..25: note = Antifungal; --NA--; --NA--
ISCQDVKQSLAPCLPYVTGRAPKPA

SEQ ID NO: 742 - protein, 38 aa, Malva parviflora
  REGION 1..38: note = Antifungal; --NA--; --NA--
ITCGQVTSQVAGCLSYLQRGGAPAPXXXXGIRNLXXMA

SEQ ID NO: 743 - protein, 90 aa, Helianthus annuus
  REGION 1..90: note = Antifungal; --NA--; --NA--
ITCNDVTGNLTPCLPYLRSGGKPTPACCAGAKKLLGATRTQADRRTACKCAKTAAPQLKVRPDMASSLPGKCGISTSIPINPNVNCNTIP

SEQ ID NO: 744 - protein, 50 aa, Heliophila coronopifolia
  REGION 1..50: note = Antifungal; Defensin; --NA--
KLCERPSGTWSGVCGNNGACRNQCIRLERARHGSCNYVFPAHKCICYFPC

SEQ ID NO: 745 - protein, 50 aa, Heliophila coronopifolia
  REGION 1..50: note = Antifungal; Defensin; --NA--
KLCERPSGTWSGVCGNNNACRNQCINLEKARHGSCNYVFPAHKCICYFPC

SEQ ID NO: 746 - protein, 50 aa, Arabidopsis thaliana
  REGION 1..50: note = Antifungal; Defensin; --NA--
LCKRESETWSGRCVNDYQCRDHCINNDRGNDGYCAGGYPWYRSCFCFFSC

SEQ ID NO: 747 - protein, 86 aa, Fagopyrum tataricum
  REGION 1..86: note = Antifungal; --NA--; --NA--
LIYAKVECLTTGVRTYVGKQSWPELVGTKGKTAAATIDKENTHVTAVLCPPLTTLAACRTFDFRCDRVRVLINRIGGVVTKTPTVG

SEQ ID NO: 748 - protein, 20 aa, Solanum tuberosum
  REGION 1..20: note = Antifungal; --NA--; --NA--
LPSDATLVLDQTGKELDARL

SEQ ID NO: 749 - protein, 98 aa, Triticum aestivum
  REGION 1..98: note = Antifungal; Thaumatin; --NA--
MASTRVLHLIALVLAVATAADAATITVVNRCSYTVWPGALPGGGVRLDPGQSWALNMPAGTAGARVWPRTGCTFDGSGRGRCITGDCGGTLACRVSGQ

SEQ ID NO: 750 - protein, 10 aa, Trapa natans
  REGION 1..10: note = Antifungal; --NA--; --NA--
MCTHPLDCSN

SEQ ID NO: 751 - protein, 98 aa, Solanum nigrum
  REGION 1..98: note = Antifungal; Thaumatin; --NA--
MGYLRSSFVFFLLTFVTYTYATSFEVRNNCPYTVWAASTPIGGGRRLDRGQTWVINAPRGTSMARIWGRTNCNFDGAGRGSCQTGDCGGVLQCTGWGK

SEQ ID NO: 752 - protein, 98 aa, Prunus domestica
  REGION 1..98: note = Antifungal; Thaumatin; --NA--
MMKTLGAVLSLSLTILSFGGAHAAKMSFKNNCPYTVWPATQTSGKKPQLSTTGFKLAPHARFKLHTPVPWNGRFWARTGCSMDAYGKFVCATADCASG

SEQ ID NO: 753 - protein, 15 aa, Hydrangea macrophylla
  REGION 1..15: note = Antifungal; --NA--; --NA--
NSMERVEELRKKLQD

SEQ ID NO: 754 - protein, 16 aa, Malva parviflora
  REGION 1..16: note = Antifungal; --NA--; --NA--
PAGPFRIPPRXRXEFQ

SEQ ID NO: 755 - protein, 15 aa, Malva parviflora
  REGION 1..15: note = Antifungal; --NA--; --NA--
PEDPQRRYQEEQRRE

SEQ ID NO: 756 - protein, 20 aa, Malva parviflora
  REGION 1..20: note = Antifungal; --NA--; --NA--
PEDPQRRYQEXQREXRXQQE

SEQ ID NO: 757 - protein, 25 aa, Glycine max
  REGION 1..25: note = Antifungal; --NA--; --NA--
PNPKVFFDMTIGGQSAGRIVMEEYA

SEQ ID NO: 758 - protein, 18 aa, Lippia sidoides
  REGION 1..18: note = Antifungal; --NA--; --NA--
PPEAAYGPGNTNSDSGDK

SEQ ID NO: 759 - protein, 14 aa, Luffa aegyptiaca
  REGION 1..14: note = Antifungal; --NA--; --NA--
PRGSPRTEYEAARR

SEQ ID NO: 760 - protein, 30 aa, Ricinus communis
  REGION 1..30: note = Antifungal; --NA--; --NA--
QDYCAQEGQQEVQRKDLSDLERYLRQSRQR

SEQ ID NO: 761 - protein, 15 aa, Cucurbita maxima
  REGION 1..15: note = Antifungal; --NA--; --NA--
QGIGVGDNDGKRGKR

SEQ ID NO: 762 - protein, 15 aa, Amaryllis belladonna
  REGION 1..15: note = Antifungal; --NA--; --NA--
QKIQEIDLQTYLQPQ

SEQ ID NO: 763 - protein, 36 aa, Raphanus sativus
  REGION 1..36: note = Raphanus sativus var. niger; Antifungal; Defensin; --NA--
QKLCQRPSGTWSGVCGNNNACKNQCIRLEKARHGSC

SEQ ID NO: 764 - protein, 98 aa, Solanum lycopersicum
  REGION 1..98: note = Antifungal; --NA--; --NA--
QNSPQDYLAVHNDARAQVGVGPMSWDANLASRAQNYANSRAGDCNLIHSGAGENLAKGGGDFTGRAAVQLWVSERPSYNYATNQCVGGKKCRHYTQVV

SEQ ID NO: 765 - protein, 98 aa, Triticum aestivum
  REGION 1..98: note = Antifungal; --NA--; --NA--
QQATNVRATYHYYRPAQNNWDLGAPAVSAYCATWDASKPLSWRSKYGWTAFCGPAGAHGQAACGKCLRVTNPATGAQITARIVDQCANGGLDLDWDTV

SEQ ID NO: 766 - protein, 98 aa, Triticum aestivum
  REGION 1..98: note = Antifungal; --NA--; --NA--
QQATNVRATYHYYRPAQNNWDLGAPAVSAYCATWDASKPLSWRSKYGWTAFCGPAGAHGQASCGKCLQVTNPATGAQITARIVDQCANGGLDLDWDTV

SEQ ID NO: 767 - protein, 98 aa, Euonymus europaeus
  REGION 1..98: note = Antifungal; --NA--; --NA--
QQCGRQAGNRRCANNLCCSQYGYCGRTNEYCCTSQGCQSQCRRCGVRTVGEIVVGDIGGIISKGMFNNILKHRDDDACEGKGFYTYEAFVAAARSFPA

SEQ ID NO: 768 - protein, 98 aa, Arabidopsis thaliana
  REGION 1..98: note = Antifungal; --NA--; --NA--
QQCGRQGGGRTCPGNICCSQYGYCGTTADYCSPTNNCQSNCWGSGPSGPGESASNVRATYHFYNPAQNNWDLRAVSAYCSTWDADKPYAWRSKYGWTA

SEQ ID NO: 769 - protein, 25 aa, Passiflora edulis
  REGION 1..25: note = Antifungal; --NA--; --NA--
QSERFEQQMQGQDFSHDERFLSQAA

SEQ ID NO: 770 - protein, 38 aa, Pisum sativum
  REGION 1..38: note = Antifungal; --NA--; --NA--
RQLKSSRRGALVCVRLKLCSAILSRGLSCGMFSCNARR

SEQ ID NO: 771 - protein, 16 aa, Malva parviflora
  REGION 1..16: note = Antifungal; --NA--; --NA--
SDYSRKRDPPQKYEEE

SEQ ID NO: 772 - protein, 98 aa, Nicotiana tabacum
  REGION 1..98: note = Antifungal; Thaumatin; --NA--
SGVFEVHNNCPYTVWAAATPVGGGRRLERGQSWWFWAPPGTKMARIWGRTNCNFDGAGRGWCQTGDCGGVLECKGWGKPPNTLAEYALNQFSNLDFWD

SEQ ID NO: 773 - protein, 98 aa, Nicotiana tabacum; identical to SEQ ID NO: 772
  REGION 1..98: note = Antifungal; Thaumatin; --NA--

SEQ ID NO: 774 - protein, 98 aa, Secale cereale
  REGION 1..98: note = Antifungal; --NA--; --NA--
SVSSIISHAQFDRMLLHRNDGACQAKGFYTYDAFVAAANAFPGFGATGSTDARKRDVAAFLAQTSHETTGGWATAPDGAFAWGYCFKQERGAAADYCT

SEQ ID NO: 775 - protein, 15 aa, Malva parviflora
  REGION 1..15: note = Antifungal; --NA--; --NA--
VAGPFRIPPLRREFQ

SEQ ID NO: 776 - protein, 33 aa, Stellaria media
  REGION 1..33: note = Antifungal; --NA--; --NA--
VDPDVRAYCKHQCMSTRGDQARKICESVCMRQD

SEQ ID NO: 777 - protein, 20 aa, Cicer arietinum
  REGION 1..20: note = Antifungal; --NA--; --NA--
VKSTGRADDDLAVKTKYLPP

SEQ ID NO: 778 - protein, 98 aa, Avena sativa
  REGION 1..98: note = Antifungal; --NA--; --NA--
VSSVISSSLFEKMLLHRGFYTYDAFIAAAKSFPAFATTGSTDVRKREVAAFLAQTSHETTGGWPTAPDGPYELGSTSDYFGRGPIQISYNYNYGAAGK

SEQ ID NO: 779 - protein, 18 aa, Engelmannia peristenia
  REGION 1..18: note = Antifungal; --NA--; --NA--
XXTKFDFFTLALQXPAXF

SEQ ID NO: 780 - protein, 49 aa, Heliophila coronopifolia
  REGION 1..49: note = Antifungal; Defensin; --NA--
YCERSSGTWSGVCGNSGKCSNQCQRLEGAAHGSCNYVFPAHKCICYYPC

SEQ ID NO: 781 - protein, 49 aa, Heliophila coronopifolia
  REGION 1..49: note = Antifungal; Defensin; --NA--
YCERSSGTWSGVCGNTDKCSSQCQRLEGAAHGSCNYVFPAHKCICYYPC

SEQ ID NO: 782 - protein, 50 aa, Helianthus annuus
  REGION 1..50: note = Antifungal; Defensin; --NA--
ELCEKASQTWSGTCGKTKHCDDQCKSWEGAAHGACHVRDGKHMCFCYFNC

SEQ ID NO: 783 - protein, 21 aa, Phaseolus vulgaris
  REGION 1..21: note = Antifungal; Defensin; --NA--
KTCENLADTYKGPCFTTGSCD

SEQ ID NO: 784 - protein, 50 aa, Capsicum chinense
  REGION 1..50: note = Antifungal; Defensin; --NA--
QNNICKTTSKHFKGLCFADSKCRKVCIQEDKFEDGHCSKLQRKCLCTKNC

SEQ ID NO: 785 - protein, 47 aa, Echinochloa crus-galli
  REGION 1..47: note = Echinochloa crus-galli; Antifungal; Defensin; Target site: lipid bilayer
RECQSQSHRYKGACVHDTNCASVCQTEGFSGGKCVGFRGRCFCTKAC

SEQ ID NO: 786 - protein, 27 aa, Brassica rapa
  REGION 1..27: note = Antifungal; Defensin; Cysteine-rich antifungal protein 1 (N-terminal fragment)
QKLCERPSGTWSGVCGNNNACKNQCIN

SEQ ID NO: 787 - protein, 44 aa, Brassica napus
  REGION 1..44: note = Antifungal; Defensin; Cysteine-rich antifungal protein 1 (N-terminal fragment)
QKLCERPSGTWSGVCGNNNACKNQCINLEKARHGSCNYVFPAHK

SEQ ID NO: 788 - protein, 27 aa, Brassica rapa
  REGION 1..27: note = Antifungal; Defensin; Cysteine-rich antifungal protein 2
QKLCERPSGTXSGVCGNNNACKNQCIR

SEQ ID NO: 789 - protein, 20 aa, Cicer arietinum
  REGION 1..20: note = Antifungal; --NA--; Shows anti-fungal activity in different species.
ARCENFADSYRQPPISSSQT

SEQ ID NO: 790 - protein, 52 aa, Sinapis alba
  REGION 1..52: note = Antifungal; Defensin; --NA--
QKLCARPSGTWSSGNCRNNNACRNFCIKLEKSRHGSCNIPFPSNKCICYFPC

SEQ ID NO: 791 - protein, 51 aa, Arabidopsis thaliana
  REGION 1..51: note = Antifungal; Defensin; --NA--
QKLCEKPSGTWSGVCGNSNACKNQCINLEGAKHGSCNYVFPAHKCICYFPC

SEQ ID NO: 792 - protein, 51 aa, Arabidopsis thaliana
  REGION 1..51: note = Antifungal; Defensin; --NA--
QKLCEKPSGTWSGVCGNSNACKNQCINLEGAKHGSCNYVFPAHKCICYVPC

SEQ ID NO: 793 - protein, 51 aa, Sinapis alba
  REGION 1..51: note = Sinapis alba, Brassica hirta; Antifungal; Defensin; --NA--
QKLCQRPSGTWSGVCGNNNACRNQCINLEKARHGSCNYVFPAHKCICYFPC

SEQ ID NO: 794 - protein, 47 aa, Tephrosia villosa
  REGION 1..47: note = Antifungal; Defensin; "Showed significant inhibition of root elongation in Arabidopsis seedlings, and affecting the exten"
KTCENLADTYRGPCFTTGSCDDHCKNKEHLLSGRCRDDFRCWCTKRC

SEQ ID NO: 795 - protein, 41 aa, Eucommia ulmoides
  REGION 1..41: note = Antifungal; --NA--; Chitin-binding peptide
XTCASRCPRPCNAGLCCSIYGYCGSGAAYCGAGNCRCQCRG

SEQ ID NO: 796 - protein, 41 aa, Eucommia ulmoides
  REGION 1..41: note = Antifungal; --NA--; Chitin-binding peptide
XTCASRCPRPCNAGLCCSIYGYCGSGNAYCGAGNCRCQCRG

SEQ ID NO: 797 - protein, 20 aa, Impatiens balsamina
  REGION 1..20: note = Antifungal; --NA--; Target site: lipid bilayer
XYRHRCCAWGPGRKYCKRWC

SEQ ID NO: 798 - protein, 28 aa, Triticum kiharae
  REGION 1..28: note = Triticum kiharae, Triticum aestivum, Triticum urartu, Triticum monococcum subsp. aegilopoides; Antifungal; alpha-Hairpin-like peptide; Target site- Lipid Bilayer
ADDRCERMCQRYHDRREKKQCMKGCRYG

SEQ ID NO: 799 - protein, 40 aa, Arabidopsis thaliana
  REGION 1..40: note = Antifungal; Defensin; Target site- Lipid Bilayer
GSCGASIAEFNSSQILAKRAPPCRRPRLQNSEDVTHTTLP

SEQ ID NO: 800 - protein, 47 aa, Medicago truncatula
  REGION 1..47: note = Antifungal; Defensin; Target site- Lipid Bilayer
RTCESQSHKFKGPCASDHNCASVCQTERFSGGRCRGFRRRCFCTTHC

SEQ ID NO: 801 - protein, 31 aa, Triticum kiharae
  REGION 1..31: note = Triticum kiharae, Triticum aestivum, Aegilops tauschii, Triticum timopheevii; Antifungal; Hairpin-like peptide; Target site- Lipid Bilayer
TDDRCERMCQHYHDRREKKQCMKGCRYGESD

SEQ ID NO: 802 - protein, 20 aa, Cullen corylifolia
  REGION 1..20: note = Antifungal; --NA--; Has protease inhibitor activity
EWEPVQNGGSSYYMVPRIWA

SEQ ID NO: 803 - protein, 47 aa, Echinochloa crus-galli
  REGION 1..47: note = Echinochloa crus-galli; Antifungal; Defensin; Target site: lipid bilayer
RECQSQSHRYKGACVHDTNCASVCQTEGFSGGKCVGFRGRCFCTKHC

SEQ ID NO: 804 - protein, 51 aa, Heliophila coronopifolia
  REGION 1..51: note = Antifungal; Knottin; Target site- Lipid Bilayer
QKLCERPSGTWSGVCGNNGACRNQCIRLERARHGSCNYVFPAHKCICYFPC

SEQ ID NO: 805 - protein, 51 aa, Heliophila coronopifolia
  REGION 1..51: note = Antifungal; Knottin; Target site- Lipid Bilayer
QKLCERPSGTWSGVCGNNNACRNQCINLEKARHGSCNYVFPAHKCICYFPC

SEQ ID NO: 806 - protein, 50 aa, Heliophila coronopifolia
  REGION 1..50: note = Antifungal; Knottin; Target site- Lipid Bilayer
RYCERSSGTWSGVCGNSGKCSNQCQRLEGAAHGSCNYVFPAHKCICYYPC

SEQ ID NO: 807 - protein, 50 aa, Heliophila coronopifolia
  REGION 1..50: note = Antifungal; Knottin; Target site- Lipid Bilayer
RYCERSSGTWSGVCGNTDKCSSQCQRLEGAAHGSCNYVFPAHKCICYYPC

SEQ ID NO: 808 - protein, 35 aa, Stellaria media
  REGION 1..35: note = Antifungal; Hevein; "Target site- Lipid Bilayer, It exhibits potent antifungal activity against important plant pathoge"
SGPNGQCGPGWGGCRGGLCCSQYGYCGSGPKYCAH

SEQ ID NO: 809 - protein, 49 aa, Petunia hybrida
  REGION 1..49: note = Antifungal; Defensin; Target site: lipid bilayer
GTCKAECPTWEGICINKAPCVKCCKAQPEKFTDGHCSKILRRCLCTKPC

SEQ ID NO: 810 - protein, 45 aa, Medicago sativa
  REGION 1..45: note = Antifungal; Defensin; Target site- Lipid Bilayer
RTCENLADKYRGPCFSGCDTHCTTKENAVSGRCRDDFRCWCTKRC

SEQ ID NO: 811 - protein, 47 aa, Pisum sativum
  REGION 1..47: note = Antifungal; Defensin; Target site: lipid bilayer
KTCENLSGTFKGPCIPDGNCNKHCRNNEHLLSGRCRDDFRCWCTNRC

SEQ ID NO: 812 - protein, 46 aa, Beta vulgaris; identical to SEQ ID NO: 546
  REGION 1..46: note = Antifungal; --NA--; AX proteins are involved in antifungal defense.

SEQ ID NO: 813 - protein, 19 aa, Vicia faba
  REGION 1..19: note = Antifungal; Vicilin; "Shows antifungal activity and can be used as ingredients in the bakery industry, a water/salt-solu"
ELAFPGSAQEVDTLLENQK

SEQ ID NO: 814 - protein, 30 aa, Broussonetia papyrifera
  REGION 1..30: note = Antifungal; --NA--; High-molecular-weight extracts show antifungal activity from paper mulberry
EQCGRQAGGALCPGGLCCXKYGWCGNTPEY

SEQ ID NO: 815 - protein, 30 aa, Broussonetia papyrifera
  REGION 1..30: note = Antifungal; --NA--; High-molecular-weight extracts show antifungal activity from paper mulberry
EQCGSQVGGKTCPNNLCCXKYGWCGDTDDH

SEQ ID NO: 816 - protein, 15 aa, Nicotiana tabacum
  REGION 1..15: note = Antifungal; --NA--; Causing lysis of the germ tubes and/or growth inhibition of fungi.
GHLIVNYEFVNCGDN

SEQ ID NO: 817 - protein, 10 aa, Lens culinaris
  REGION 1..10: note = Antifungal; Lectin; "Shows antifungal activity and can be used as ingredients in the bakery industry, a water/salt-solu"
HIGIDVNSIK

SEQ ID NO: 818 - protein, 9 aa, Pisum sativum
  REGION 1..9: note = Antifungal; Vicilin; "Shows antifungal activity and can be used as ingredients in the bakery industry, a water/salt-solu"
IFENLQNYR

SEQ ID NO: 819 - protein, 7 aa, Prosopis cineraria
  REGION 1..7: note = Antifungal; --NA--; "Exerted antifungal activity against post-harvest fruit fungal pathogens, isolated from the rotten "
KAKVGRA

SEQ ID NO: 820 - protein, 20 aa, Prosopis cineraria
  REGION 1..20: note = Antifungal; --NA--; "Exerted antifungal activity against post-harvest fruit fungal pathogens, isolated from the rotten "
KDECHPPSVNTRHDEEEEKA

SEQ ID NO: 821 - protein, 6 aa, Prosopis cineraria
  REGION 1..6: note = Antifungal; --NA--; "Exerted antifungal activity against post-harvest fruit fungal pathogens, isolated from the rotten "
KEHQRA

SEQ ID NO: 822 - protein, 10 aa, Prosopis cineraria
  REGION 1..10: note = Antifungal; --NA--; "Exerted antifungal activity against post-harvest fruit fungal pathogens, isolated from the rotten "
KENASVGVKQ

SEQ ID NO: 823 - protein, 29 aa, Raphanus sativus
  REGION 1..29: note = Antifungal; --NA--; "Shows antifungal activity, specifically inhibit fungal growth."
KLCERPSGTWSGVCGNNNACKNQCINLEK

SEQ ID NO: 824 - protein, 27 aa, Raphanus sativus
  REGION 1..27: note = Antifungal; --NA--; "Shows antifungal activity, specifically inhibit fungal growth."
KLCQRPSGTWSGVCGNNNACKNQCIRL

SEQ ID NO: 825 - protein, 50 aa, Raphanus sativus
  REGION 1..50: note = Antifungal; --NA--; Exhibit potent antifungal activity in vitro.
KLXERSSGTWSGVXGNNNAXKNQXIRLEGAQHGSXNYVFPAHKXIXYFPX

SEQ ID NO: 826 - protein, 28 aa, Prosopis cineraria
  REGION 1..28: note = Antifungal; --NA--; "Exerted antifungal activity against post-harvest fruit fungal pathogens, isolated from the rotten "
KLYSKVELHPFGLHNLGNSCYANAVFSV

SEQ ID NO: 827 - protein, 24 aa, Prosopis cineraria
  REGION 1..24: note = Antifungal; --NA--; "Exerted antifungal activity against post-harvest fruit fungal pathogens, isolated from the rotten "
KQVAEMNKPAVGSKTSDANHDLKS

SEQ ID NO: 828 - protein, 28 aa, Prosopis cineraria
  REGION 1..28: note = Antifungal; --NA--; "Exerted antifungal activity against post-harvest fruit fungal pathogens, isolated from the rotten "
KSAGNDSIQSTKPVPSALTVDKATSVRG

SEQ ID NO: 829 - protein, 46 aa, Phoradendron tomentosum
  REGION 1..46: note = Antifungal; --NA--; To control and/or inhibit the growth of phytopathogenic fungi.
KSCCPNTTGRNIYNTCRLGGGSRERCASLSGCKIISGSTCPSDYPK

SEQ ID NO: 830 - protein, 20 aa, Prosopis cineraria
  REGION 1..20: note = Antifungal; --NA--; "Exerted antifungal activity against post-harvest fruit fungal pathogens, isolated from the rotten "
KSNSTVEISQNVQSVDSSKM

SEQ ID NO: 831 - protein, 46 aa, Pisum sativum
  REGION 1..46: note = Antifungal; Defensin; Shows strongest antifungal activity
KTCEHLADTYRGVCFTNASCDDHCKNKAHLISGTCHNWKCFCTQNC

SEQ ID NO: 832 - protein, 25 aa, Prosopis cineraria
  REGION 1..25: note = Antifungal; --NA--; "Exerted antifungal activity against post-harvest fruit fungal pathogens, isolated from the rotten "
KTKSAGNDSIQSTKPVPSALTVDKA

SEQ ID NO: 833 - protein, 10 aa, Prosopis cineraria
  REGION 1..10: note = Antifungal; --NA--; "Exerted antifungal activity against post-harvest fruit fungal pathogens, isolated from the rotten "
KVADSLPDRS

SEQ ID NO: 834 - protein, 19 aa, Pisum sativum
  REGION 1..19: note = Antifungal; Endochitinase A2; "Shows antifungal activity and can be used as ingredients in the bakery industry, a water/salt-solu"
LPGYGTVTNIINGGLECGR

SEQ ID NO: 835 - protein, 59 aa, Theobroma cacao
  REGION 1..59: note = Antifungal; --NA--; "Participate in the innate immune response of plants, therapeutically useful as anticancer agents a"
LQRQYQQCQGRCQEQQQGQREQQQCQRKCWEQYKEQERGEHENYHNHKKNRSEEEEQQS

SEQ ID NO: 836 - protein, 18 aa, Vicia faba
  REGION 1..18: note = Antifungal; Vicilin; "Shows antifungal activity and can be used as ingredients in the bakery industry, a water/salt-solu"
LSPGDVLVIPAGYPVAIK

SEQ ID NO: 837 - protein, 20 aa, Prosopis cineraria
  REGION 1..20: note = Antifungal; --NA--; "Exerted antifungal activity against post-harvest fruit fungal pathogens, isolated from the rotten "
MTSVCSSCCSFKCQIAHWRQ

SEQ ID NO: 838 - protein, 63 aa, Triticum aestivum
  REGION 1..63: note = Antifungal; Thionin; Shown to exhibit high in vitro lytic activity against R. solani strain LR172 for rice and soyabean
MVCLLILGLVLEQVQVEGKSCCRSTLGRNCYNLCRVRGAQKLCAGVCRCKLTSSGKCPTGFPK

SEQ ID NO: 839 - protein, 16 aa, Pisum sativum
  REGION 1..16: note = Antifungal; Vicilin; "Shows antifungal activity and can be used as ingredients in the bakery industry, a water/salt-solu"
NILEASFNTDYEEIEK

SEQ ID NO: 840 - protein, 12 aa, Lens culinaris
  REGION 1..12: note = Antifungal; Lectin; "Shows antifungal activity and can be used as ingredients in the bakery industry, a water/salt-solu"
NLIFQGDGYTTK

SEQ ID NO: 841 - protein, 44 aa, Moringa oleifera
  REGION 1..44: note = Antifungal; Hevein; Shows strong antifungal activity or chitin-binding property
QNCGRQAGNRACANGLCCSQYGFCGSTSEYCSRANGCQSNCRGG

SEQ ID NO: 842 - protein, 43 aa, Moringa oleifera
  REGION 1..43: note = Antifungal; Hevein; Shows strong antifungal activity or chitin-binding property
QNCGRQAGNRACANQLCCSQYGFCSTSEYCSRANGCQSNCRGG

SEQ ID NO: 843 - protein, 24 aa, Prosopis cineraria
  REGION 1..24: note = Antifungal; --NA--; "Exerted antifungal activity against post-harvest fruit fungal pathogens, isolated from the rotten "
RELEDSNIHHVAASVVLESKSSRT

SEQ ID NO: 844 - protein, 11 aa, Prosopis cineraria
  REGION 1..11: note = Antifungal; --NA--; "Exerted antifungal activity against post-harvest fruit fungal pathogens, isolated from the rotten "
RHDEEEEKAKV

SEQ ID NO: 845 - protein, 15 aa, Prosopis cineraria
  REGION 1..15: note = Antifungal; --NA--; "Exerted antifungal activity against post-harvest fruit fungal pathogens, isolated from the rotten "
RSSFVNKEFCNHSKE

SEQ ID NO: 846 - protein, 11 aa, Prosopis cineraria
  REGION 1..11: note = Antifungal; --NA--; "Exerted antifungal activity against post-harvest fruit fungal pathogens, isolated from the rotten "
RTPIHVELERS

SEQ ID NO: 847 - protein, 30 aa, Beta vulgaris
  REGION 1..30: note = Antifungal; --NA--; Exhibiting in vitro antifungal activity against the devastating leaf pathogen.
SGECNMYGRCPPGYCCSKFGYCGVGRAYCG

SEQ ID NO: 848 - protein, 22 aa, Nicotiana tabacum
  REGION 1..22: note = Antifungal; --NA--; Causing lysis of the germ tubes and/or growth inhibition of fungi.
TAFYGPVGPPGRDSCGKGLVTN

SEQ ID NO: 849 - protein, 27 aa, Nicotiana tabacum
  REGION 1..27: note = Antifungal; --NA--; Causing lysis of the germ tubes and/or growth inhibition of fungi.
YASQGCQSQRSGGGGGGGGGGGGGAQN

SEQ ID NO: 850 - protein, 47 aa, Theobroma cacao
  REGION 1..47: note = Antifungal; --NA--; "Participate in the innate immune response of plants, therapeutically useful as anticancer agents a"
YERDPRQQYEQCQRRCESEATEEREQEQCEQRCEREYKEQQRQQEEE

SEQ ID NO: 851 - protein, 20 aa, Cicer arietinum
  REGION 1..20: note = Antifungal; --NA--; Shows anti-fungal activity in different species.
GVGYKVVVTTTAAADDDDVV

SEQ ID NO: 852 - protein, 27 aa, Benincasa hispida
  REGION 1..27: note = Antifungal; Ribosome-inactivating; "Having potential mechanism in defense against pathogens and insect pest attacks, including antibac"
RDWERREFERRQNELRREQEQRREELL

SEQ ID NO: 853 - protein, 51 aa, Raphanus sativus
  REGION 1..51: note = Antifungal; Defensin; Exhibit potent antifungal activity in vitro.
QKLCQRPSGTWSGVCGNNNACKNQCIRLEKARHGSCNYVFPAHKCICYFPC

SEQ ID NO: 854 - protein, 91 aa, Beta vulgaris
  REGION 1..91: note = Antifungal; Lipid-transfer protein; --NA--
ITCGLVASKLAPCIGYLQGAPGPSAACCGGIKSLNSAAASPADRKTACTCLKSAATSMKGINYGKAASLPRQCGVSIPYAISPNTNCNAIH

SEQ ID NO: 855 - protein, 30 aa, Beta vulgaris
  REGION 1..30: note = Antifungal; Hevein; --NA--
SGECNMYGRCPPGYCCSKFGYCGGVRAYCG

SEQ ID NO: 856 - protein, 46 aa, Viscum album
  REGION 1..46: note = Antifungal; Thionin; To control and/or inhibit the growth of phytopathogenic fungi.
KSCCPNTTGRNIYNACRLTGAPRPTCAKLSGCKIISGSTCPSDYPK

SEQ ID NO: 857 - protein, 93 aa, Oryza sativa
  REGION 1..93: note = Oryza sativa subsp. Japonica; Antifungal; Lipid-transfer protein; --NA--
AVSCGDVTSSIAPCLSYVMGRESSPSSSCCSGVRTLNGKASSSADRRTACSCLKNMASSFRNLNMGNAASIPSKCGVSVAFPISTSVDCSKIN

SEQ ID NO: 858 - protein, 51 aa, Arabidopsis thaliana
  REGION 1..51: note = Antifungal; Defensin; --NA--
QKLCERPSGTWSGVCGNSNACKNQCINLEKARHGSCNYVFPAHKCICYFPC

SEQ ID NO: 859 - protein, 41 aa, Eucommia ulmoides
  REGION 1..41: note = Antifungal; "Hevein, Chitin-binding"; --NA--
QTCASRCPRPCNAGLCCSIYGYCGSGAAYCGAGNCRCQCRG

SEQ ID NO: 860 - protein, 41 aa, Eucommia ulmoides
  REGION 1..41: note = Antifungal; Hevein; --NA--
QTCASRCPRPCNAGLCCSIYGYCGSGNAYCGAGNCRCQCRG

SEQ ID NO: 861 - protein, 45 aa, Euonymus europaeus
  REGION 1..45: note = Antifungal; Hevein; Target site- Lipid Bilayer
QQCGRQAGNRRCPNNLCCSQFGYCGRTNEYCCTGFGCQSNCRRCG

SEQ ID NO: 862 - protein, 51 aa, Raphanus sativus
  REGION 1..51: note = Antifungal; Defensin; Exhibit potent antifungal activity in vitro.
QKLCERPSGTWSGVCGNNNACKNQCINLEKARHGSCNYVFPAHKCICYFPC

SEQ ID NO: 863 - protein, 21 aa, Capsicum baccatum
  REGION 1..21: note = "Antifungal, Alpha-amylase-inhibitor"; Vicilin; Shows antimicrobial activity and inhibitory effects against  -amylase. The H4 fraction exhibited s
GMCEMSQRCEQQFCRAQNLRT

SEQ ID NO: 864 - protein, 23 aa, Brassica napus
  REGION 1..23: note = Brassica napus, Raphanus sativus; "Antifungal, Antibacterial"; Defensin; Cysteine-rich antifungal protein 2; These are identified as good candidates for development of nat
QKLCERPSGTWSGVCGNNNACKN

SEQ ID NO: 865 - protein, 52 aa, Zea mays
  REGION 1..52: note = "Antifungal, Antibacterial"; Defensin; "Protect the embryo at the very early stages of seed development, and defence mechanism of the kern"
KLCSTTMDLLICGGAIPGAVNQACDDTCRNKGYTGGGFCNMKIQRCVCRKPC

SEQ ID NO: 866 - protein, 29 aa, Amaranthus caudatus
  REGION 1..29: note = Amaranthus caudatus, Amaranthus hypochondriacus, Amaranthus tricolor, Amaranthus retroflexus, Amar"; "Antifungal, Antibacterial"; Hevein; Target site- Lipid Bilayer; Chitin-binding peptide; Not active up to 500 micro-g/ml- Human umbilical en
VGECVRGRCPSGMCCSQFGYCGKGPKYCG

SEQ ID NO: 867 - protein, 16 aa, Pinus sylvestris
  REGION 1..16: note = "Antifungal, Antibacterial"; --NA--; Used as plant defensins against fungi and bacteria
TEGFPTGSCDFHVAGR

SEQ ID NO: 868 - protein, 31 aa, Datura stramonium
  REGION 1..31: note = "Antifungal, Antibiofilm"; glycopeptide; --NA--
TFPKCAPTRPPGPKPCDINNFKSKFWHIWRA

SEQ ID NO: 869 - protein, 46 aa, Viscum album
  REGION 1..46: note = "Antifungal, Anticancer"; Thionin; --NA--
KSCCPNTTGRNIYNTCRLGGGSRERCASLSGCKIISASTCPSDYPK

SEQ ID NO: 870 - protein, 79 aa, Pinus monticola
  REGION 1..79: note = "Antifungal, Antimicrobial"; --NA--; --NA--
SYFSAWAGPGCNNHNARYSKCGCSNIGHNVHGGYEFVYQGQTAAAYNTDNCKGVAQTRFSSSVNQACSNFGWKSVFIQC

SEQ ID NO: 871 - protein, 49 aa, Clitoria ternatea
  REGION 1..49: note = "Antifungal, Antimicrobial"; Defensin; Inhibition of in vitro protein synthesis and inhibition of alpha-amylases. It also show antimicrob
NLCERASLTWTGNCGNTGHCDTQCRNWESAKHGACHKRGNWKCFCYFDC

SEQ ID NO: 872 - protein, 47 aa, Arabidopsis thaliana
  REGION 1..47: note = "Antifungal, Antimicrobial"; Defensin; --NA--
RTCASQSQRFKGKCVSDTNCENVCHNEGFPGGDCRGFRRRCFCTRNC

SEQ ID NO: 873 - protein, 47 aa, Arabidopsis thaliana
  REGION 1..47: note = "Antifungal, Antimicrobial"; Defensin; --NA--
RTCESQSHRFKGTCVSASNCANVCHNEGFVGGNCRGFRRRCFCTRHC

SEQ ID NO: 874 - protein, 47 aa, Arabidopsis thaliana
  REGION 1..47: note = "Antifungal, Antimicrobial"; Defensin; --NA--
RTCETSSNLFNGPCLSSSNCANVCHNEGFSDGDCRGFRRRCLCTRPC

SEQ ID NO: 875 - protein, 50 aa, Stellaria media
  REGION 1..50: note = "Antifungal, Antimicrobial"; Defensin; Target site- Lipid Bilayer
KICERASGTWKGICIHSNDCNNQCVKWENAGSGSCHYQFPNYMCFCYFNC

SEQ ID NO: 876 - protein, 45 aa, Nicotiana megalosiphon
  REGION 1..45: note = "Antifungal, Antimicrobial"; Defensin; Target site- Lipid Bilayer
RECKAQGRHGTCFRDANCVQVCEKQAGWSHGDCRAQFKCKCIFEC

SEQ ID NO: 877 - protein, 35 aa, Dendrocalamus latiflorus
  REGION 1..35: note = Dendrocalamus latiflorus Munro; "Antifungal, Antimicrobial"; Defensin; Target site: lipid bilayer
TTLTLHNLCPYPVWWLVTPNNGGFPIIDNTPVVLG

SEQ ID NO: 878 - protein, 11 aa, Trapa natans
  REGION 1..11: note = "Antifungal, Antimicrobial"; Cysteine rich peptides; Target site- Lipid Bilayer
LMCTHPLDCSN

SEQ ID NO: 879 - protein, 47 aa, Arabidopsis thaliana
  REGION 1..47: note = Arabidopsis thaliana, Arabidopsis lyrata; "Antifungal, Antimicrobial"; Defensin; Target site- Lipid Bilayer
RTCESKSHRFKGPCVSTHNCANVCHNEGFGGGKCRGFRRRCYCTRHC

SEQ ID NO: 880 - protein, 10 aa, Pisum sativum
  REGION 1..10: note = "Antifungal, Antiproliferative, HIV-1-reverse-transcriptase-inhibition"; --NA--; It has antifungal activity on a number of fungal species. It also inhibit the proliferation in the
KTCEHLADTY

SEQ ID NO: 881 - protein, 10 aa, Arachis diogoi
  REGION 1..10: note = Arachis diogoi, Cicer arietinum, Cajanus cajan, Trigonella foenum-graccum"; "Antifungal, Antiproliferative, HIV-1-reverse-transcriptase-inhibition"; --NA--; It has antifungal activity on a number of fungal species. It also inhibit the proliferation in the
KTCENLADKY

SEQ ID NO: 882 - protein, 10 aa, Vigna radiata
  REGION 1..10: note = "Antifungal, Antiproliferative, HIV-1-reverse-transcriptase-inhibition"; --NA--; It has antifungal activity on a number of fungal species. It also inhibit the proliferation in the
KTCENLANTY

SEQ ID NO: 883 - protein, 10 aa, Vigna unguiculata
  REGION 1..10: note = "Antifungal, Antiproliferative, HIV-1-reverse-transcriptase-inhibition"; --NA--; It has antifungal activity on a number of fungal species. It also inhibit the proliferation in the
KTCENLVDTY

SEQ ID NO: 884 - protein, 10 aa, Medicago sativa
  REGION 1..10: note = "Antifungal, Antiproliferative, HIV-1-reverse-transcriptase-inhibition"; --NA--; It has antifungal activity on a number of fungal species. It also inhibit the proliferation in the
RTCENLADKY

SEQ ID NO: 885 - protein, 26 aa, Echinochloa crus-galli
  REGION 1..26: note = Echinochloa crus-galli; "Antifungal, Anti-protist"; --NA--; Target site: lipid bilayer
DRCSQQCQHHRDPDRKQQCMRECRRH

SEQ ID NO: 886 - protein, 31 aa, Echinochloa crus-galli
  REGION 1..31: note = Echinochloa crus-galli; "Antifungal, Anti-protist, Antimicrobial"; --NA--; Target site: lipid bilayer
DRCSQQCQHHRDPDRKQQCMRECRRHQGRSD

SEQ ID NO: 887 - protein, 37 aa, Echinochloa crus-galli
  REGION 1..37: note = Echinochloa crus-galli; "Antifungal, Anti-protist, Antimicrobial"; Hairpin-like peptide; Target site: lipid bilayer
GSGRGSCRSQCMRRHEDEPWRVQECVSQCRRRRGGGD

SEQ ID NO: 888 - protein, 15 aa, Castanopsis chinensis
  REGION 1..15: note = "Antifungal, Antiviral"; Thaumatin; --NA--
AKITFTNNHPRTIWP

SEQ ID NO: 889 - protein, 20 aa, Actinidia chinensis
  REGION 1..20: note = "Antifungal, Antiviral"; Thaumatin; --NA--
ATFNFINNCPFTVWAAAVPG

SEQ ID NO: 890 - protein, 16 aa, Basella alba
  REGION 1..16: note = "Antifungal, Antiviral"; --NA--; --NA--
KIMAKPSKFYEQLRGR

SEQ ID NO: 891 - protein, 20 aa, Basella alba
  REGION 1..20: note = "Antifungal, Antiviral"; --NA--; --NA--
GADFQECMKEHSQKQHQHQG

SEQ ID NO: 892 - protein, 10 aa, Cocos nucifera
  REGION 1..10: note = "Antifungal, Antiviral, Anti-HIV"; --NA--; --NA--
EQCREEEDDR

SEQ ID NO: 893 - protein, 23 aa, Coffea canephora
  REGION 1..23: note = "Antifungal, Enzyme-inhibitor"; Lipid-transfer protein; --NA--
ITCQQVTSELGPCVPYLTGQGIP

SEQ ID NO: 894 - protein, 47 aa, Sorghum bicolor
  REGION 1..47: note = "Antifungal, Enzyme-inhibitor"; Defensin; Target site: lipid bilayer; inhibits strongly the alpha-amylases from the guts of locust and cockr
RVCMGKSQHHSFPCISDRLCSNECVKEEGGWTAGYCHLRYCRCQKAC

SEQ ID NO: 895 - protein, 20 aa, Impatiens balsamina
  REGION 1..20: note = "Antifungal, Hemolytic, Cytotoxic"; --NA--; Target site: lipid bilayer; 0% Hemolysis against Human erythrocytes at 200 micro-g/ml
XYGRRCCNWGPGRRYCKRWC

SEQ ID NO: 896 - protein, 7 aa, Allium cepa
  REGION 1..7: note = Allium cepa var. aggregatum; "Antifungal, Hemolytic, Cytotoxic"; Ascalin; "Target site: lipid bilayer; Rabbit erythrocytes; Shows anti-fungal activity, by inhibiting the myc"
YQCGQGG

SEQ ID NO: 897 - protein, 16 aa, Phaseolus vulgaris
  REGION 1..16: note = "Antifungal, HIV-1-reverse-transcriptase-inhibition, Antimicrobial"; --NA--; It possess potent antifungal activity toward a variety of fungal species. It also show mitogenic a
KTCENLADTYKGPCFT

SEQ ID NO: 898 - protein, 15 aa, Adzuckia angularia
  REGION 1..15: note = "Antifungal, HIV-1-reverse-transcriptase-inhibition, Antimicrobial"; --NA--; It possess potent antifungal activity toward a variety of fungal species. It also show mitogenic a
RTCENLANTYRGPCI

SEQ ID NO: 899 - protein, 93 aa, Canavalia ensiformis
  REGION 1..93: note = "Antifungal, Insecticidal"; fragment of canatoxin; --NA--
MGPVNEANCKAAMEIVCRREFGHKEEEDASEGVTTGDPDCPFTKAIPREEYANKYGPTIGDKIRLGDTDLIAEIEKDFALYGDESVFGGGKVI

SEQ ID NO: 900 - protein, 52 aa, Capsicum annuum
  REGION 1..52: note = "Antifungal, Serine-protease-inhibitor"; Protease inhibitor I20; "Target site- Lipid Bilayer; The S3 fraction showed the highest antifungal activity, inhibiting all"
KACPRNCDTDIAYMVCPSSGERIIRKVCTNCCAAQKGCKLFRSNGSIKCTGT

SEQ ID NO: 901 - protein, 45 aa, Hordeum vulgare
  REGION 1..45: note = "Antifungal, Toxin"; Thionin; is toxic to animal cells
KSCCRSTLGRNCYNLCRVRGAQKLCANACRCKLTSGLKCPSSFPK

SEQ ID NO: 902 - protein, 30 aa, Oldenlandia affinis
  REGION 1..30: note = "Anti-HIV, Insecticidal"; Cyclotide; Shown to possess insecticidal and anti-HIV activity.
GVPCAESCVYIPCISTVLGCSCSNQVCYRN

SEQ ID NO: 903 - protein, 5 aa, Glycine max
  REGION 1..5: note = Antihypertensive; --NA--; --NA--
AEFGS

SEQ ID NO: 904 - protein, 5 aa, Glycine max
  REGION 1..5: note = Antihypertensive; --NA--; --NA--
AFPGS

SEQ ID NO: 905 - protein, 5 aa, Glycine max
  REGION 1..5: note = Antihypertensive; --NA--; --NA--
AFPRS

SEQ ID NO: 906 - protein, 5 aa, Porphyra yezoensis
  REGION 1..5: note = Antihypertensive; --NA--; --NA--
AKYSY

SEQ ID NO: 907 - protein, 7 aa, Linum usitatissimum
  REGION 1..7: note = Antihypertensive; --NA--; --NA--
ARDLPGQ

SEQ ID NO: 908 - protein, 5 aa, Glycine max
  REGION 1..5: note = Antihypertensive; --NA--; --NA--
ARPSR

SEQ ID NO: 909 - protein, 5 aa, Linum usitatissimum
  REGION 1..5: note = Antihypertensive; --NA--; --NA--
ASVRT

SEQ ID NO: 910 - protein, 7 aa, Ficus carica
  REGION 1..7: note = Antihypertensive; --NA--; --NA--
AVPYPQR

SEQ ID NO: 911 - protein, 5 aa, Zea mays
  REGION 1..5: note = Antihypertensive; --NA--; --NA--
AYPQQ

SEQ ID NO: 912 - protein, 7 aa, Ipomoea batatas
  REGION 1..7: note = Antihypertensive; --NA--; --NA--
CFCTKPC

SEQ ID NO: 913 - protein, 7 aa, Arachis hypogaea
  REGION 1..7: note = Antihypertensive; --NA--; --NA--
CVTPALR

SEQ ID NO: 914 - protein, 6 aa, Linum usitatissimum
  REGION 1..6: note = Antihypertensive; --NA--; --NA--
DYLRSC

SEQ ID NO: 915 - protein, 5 aa, Pisum sativum
  REGION 1..5: note = Antihypertensive; --NA--; --NA--
ERGDT

SEQ ID NO: 916 - protein, 5 aa, Glycine max
  REGION 1..5: note = Antihypertensive; --NA--; --NA--
FREGD

SEQ ID NO: 917 - protein, 5 aa, Hordeum vulgare
  REGION 1..5: note = Antihypertensive; --NA--; --NA--
FRHEA

SEQ ID NO: 918 - protein, 8 aa, Ipomoea batatas
  REGION 1..8: note = Antihypertensive; --NA--; --NA--
FTDVDFIK

SEQ ID NO: 919 - protein, 5 aa, Glycine max
  REGION 1..5: note = Antihypertensive; --NA--; --NA--
GCETR

SEQ ID NO: 920 - protein, 5 aa, Ipomoea batatas
  REGION 1..5: note = Antihypertensive; --NA--; --NA--
GPCSR

SEQ ID NO: 921 - protein, 7 aa, Linum usitatissimum
  REGION 1..7: note = Antihypertensive; --NA--; --NA--
GQMRQPI

SEQ ID NO: 922 - protein, 5 aa, Ipomoea batatas
  REGION 1..5: note = Antihypertensive; --NA--; --NA--
GTEKC

SEQ ID NO: 923 - protein, 6 aa, Zea mays
  REGION 1..6: note = Antihypertensive; --NA--; --NA--
HLPPPV

SEQ ID NO: 924 - protein, 5 aa, Pisum sativum
  REGION 1..5: note = Antihypertensive; --NA--; --NA--
IDPNG

SEQ ID NO: 925 - protein, 5 aa, Avena sativa
  REGION 1..5: note = Antihypertensive; --NA--; --NA--
IEPQG

SEQ ID NO: 926 - protein, 7 aa, Ipomoea batatas
  REGION 1..7: note = Antihypertensive; --NA--; --NA--
IMVAEAR

SEQ ID NO: 927 - protein, 7 aa, Spinacia oleracea
  REGION 1..7: note = Antihypertensive; --NA--; --NA--
IRYLPRG

SEQ ID NO: 928 - protein, 5 aa, Glycine max
  REGION 1..5: note = Antihypertensive; --NA--; --NA--
ISSSK

SEQ ID NO: 929 - protein, 5 aa, Glycine max
  REGION 1..5: note = Antihypertensive; --NA--; --NA--
IYSNN

SEQ ID NO: 930 - protein, 5 aa, Avena sativa
  REGION 1..5: note = Antihypertensive; --NA--; --NA--
LCNGS

SEQ ID NO: 931 - protein, 5 aa, Pisum sativum
  REGION 1..5: note = Antihypertensive; --NA--; --NA--
LHLPS

SEQ ID NO: 932 - protein, 5 aa, Glycine max
  REGION 1..5: note = Antihypertensive; --NA--; --NA--
LKSQQ

SEQ ID NO: 933 - protein, 5 aa, Zea mays
  REGION 1..5: note = Antihypertensive; --NA--; --NA--
LLPPY

SEQ ID NO: 934 - protein, 5 aa, Glycine max
  REGION 1..5: note = Antihypertensive; --NA--; --NA--
LNECQ

SEQ ID NO: 935 - protein, 6 aa, Zea mays
  REGION 1..6: note = Antihypertensive; --NA--; --NA--
LNSPAY

SEQ ID NO: 936 - protein, 6 aa, Zea mays
  REGION 1..6: note = Antihypertensive; --NA--; --NA--
LPPPVH

SEQ ID NO: 937 - protein, 5 aa, Hordeum vulgare
  REGION 1..5: note = Antihypertensive; --NA--; --NA--
LQPHQ

SEQ ID NO: 938 - protein, 5 aa, Hordeum vulgare
  REGION 1..5: note = Antihypertensive; --NA--; --NA--
LQQGG

SEQ ID NO: 939 - protein, 5 aa, Zea mays
  REGION 1..5: note = Antihypertensive; --NA--; --NA--
LQQQP

SEQ ID NO: 940 - protein, 5 aa, Zea mays
  REGION 1..5: note = Antihypertensive; --NA--; --NA--
LQQQQ

SEQ ID NO: 941 - protein, 5 aa, Pisum sativum
  REGION 1..5: note = Antihypertensive; --NA--; --NA--
LRQRQ

SEQ ID NO: 942 - protein, 5 aa, Glycine max
  REGION 1..5: note = Antihypertensive; --NA--; --NA--
LRQSQ

SEQ ID NO: 943 - protein, 5 aa, Avena sativa
  REGION 1..5: note = Antihypertensive; --NA--; --NA--
LRRGQ

SEQ ID NO: 944 - protein, 5 aa, Glycine max
  REGION 1..5: note = Antihypertensive; --NA--; --NA--
LRRQQ

SEQ ID NO: 945 - protein, 6 aa, Zea mays
  REGION 1..6: note = Antihypertensive; --NA--; --NA--
LSPQSY

SEQ ID NO: 946 - protein, 5 aa, Pisum sativum
  REGION 1..5: note = Antihypertensive; --NA--; --NA--
LSRGQ

SEQ ID NO: 947 - protein, 5 aa, Glycine max
  REGION 1..5: note = Antihypertensive; --NA--; --NA--
LYKNG

SEQ ID NO: 948 - protein, 5 aa, Pisum sativum
  REGION 1..5: note = Antihypertensive; --NA--; --NA--
LYRNG

SEQ ID NO: 949 - protein, 8 aa, Ipomoea batatas
  REGION 1..8: note = Antihypertensive; --NA--; --NA--
MCESASSK

SEQ ID NO: 950 - protein, 7 aa, Ipomoea batatas
  REGION 1..7: note = Antihypertensive; --NA--; --NA--
MMEPMVK

SEQ ID NO: 951 - protein, 6 aa, Linum usitatissimum
  REGION 1..6: note = Antihypertensive; --NA--; --NA--
NIDTDL

SEQ ID NO: 952 - protein, 6 aa, Linum usitatissimum
  REGION 1..6: note = Antihypertensive; --NA--; --NA--
NLDTDI

SEQ ID NO: 953 - protein, 6 aa, Zea mays
  REGION 1..6: note = Antihypertensive; --NA--; --NA--
PPPVHL

SEQ ID NO: 954 - protein, 5 aa, Triticum aestivum
  REGION 1..5: note = Antihypertensive; --NA--; --NA--
PVPQP

SEQ ID NO: 955 - protein, 6 aa, Oryza sativa
  REGION 1..6: note = Antihypertensive; --NA--; --NA--
RADHPF

SEQ ID NO: 956 - protein, 5 aa, Linum usitatissimum
  REGION 1..5: note = Antihypertensive; --NA--; --NA--
RDLPG

SEQ ID NO: 957 - protein, 6 aa, Linum usitatissimum
  REGION 1..6: note = Antihypertensive; --NA--; --NA--
RGLERA

SEQ ID NO: 958 - protein, 5 aa, Pisum sativum
  REGION 1..5: note = Antihypertensive; --NA--; --NA--
SKPHT

SEQ ID NO: 959 - protein, 8 aa, Linum usitatissimum
  REGION 1..8: note = Antihypertensive; --NA--; --NA--
TCRGLERA

SEQ ID NO: 960 - protein, 6 aa, Zea mays
  REGION 1..6: note = Antihypertensive; --NA--; --NA--
TTMPLW

SEQ ID NO: 961 - protein, 6 aa, Vigna angularis
  REGION 1..6: note = Antihypertensive; --NA--; --NA--
VGLPIF

SEQ ID NO: 962 - protein, 5 aa, Zea mays
  REGION 1..5: note = Antihypertensive; --NA--; --NA--
VHIPP

SEQ ID NO: 963 - protein, 5 aa, Zea mays
  REGION 1..5: note = Antihypertensive; --NA--; --NA--
VHLAP

SEQ ID NO: 964 - protein, 6 aa, Zea mays
  REGION 1..6: note = Antihypertensive; --NA--; --NA--
VHLPPP

SEQ ID NO: 965 - protein, 6 aa, Phaseolus vulgaris
  REGION 1..6: note = Antihypertensive; --NA--; --NA--
VIPAAY

SEQ ID NO: 966 - protein, 5 aa, Ipomoea batatas
  REGION 1..5: note = Antihypertensive; --NA--; --NA--
VKAGE

SEQ ID NO: 967 - protein, 7 aa, Glycine max
  REGION 1..7: note = Antihypertensive; --NA--; --NA--
VMDKPQG

SEQ ID NO: 968 - protein, 5 aa, Pisum sativum
  REGION 1..5: note = Antihypertensive; --NA--; --NA--
VRKGQ

SEQ ID NO: 969 - protein, 5 aa, Hordeum vulgare
  REGION 1..5: note = Antihypertensive; --NA--; --NA--
VRMPQ

SEQ ID NO: 970 - protein, 5 aa, Ipomoea batatas
  REGION 1..5: note = Antihypertensive; --NA--; --NA--
VVGAK

SEQ ID NO: 971 - protein, 5 aa, Chlorella vulgaris
  REGION 1..5: note = Antihypertensive; --NA--; --NA--
VVPPA

SEQ ID NO: 972 - protein, 5 aa, Zea mays
  REGION 1..5: note = Antihypertensive; --NA--; --NA--
YLEPA

SEQ ID NO: 973 - protein, 6 aa, Zea mays
  REGION 1..6: note = Antihypertensive; --NA--; --NA--
YSQQQQ

SEQ ID NO: 974 - protein, 20 aa, Cannabis sativa
  REGION 1..20: note = Antihypertensive; --NA--; ACE-inhibitory peptides maintain the gastrointestinal stability and reach the cardiovascular syste
DNTSEQPGACVMILYFHKRW

SEQ ID NO: 975 - protein, 9 aa, Hordeum vulgare
  REGION 1..9: note = Antihypertensive; --NA--; Showing highest antimicrobial and antihypertensive activity.
EVSLNSGYY

SEQ ID NO: 976 - protein, 9 aa, Pisum sativum
  REGION 1..9: note = Antihypertensive; --NA--; "Shows antihypertensive activity, renin inhibition and significantly shows the fastest decrease in "
FEGTVFENG

SEQ ID NO: 977 - protein, 7 aa, Pisum sativum
  REGION 1..7: note = Antihypertensive; --NA--; "Shows antihypertensive activity, renin inhibition and significantly shows the fastest decrease in "
IFENLQN

SEQ ID NO: 978 - protein, 6 aa, Pisum sativum
  REGION 1..6: note = Antihypertensive; --NA--; "Shows antihypertensive activity, renin inhibition and significantly shows the fastest decrease in "
IIPLEN

SEQ ID NO: 979 - protein, 8 aa, Glycine max
  REGION 1..8: note = Antihypertensive; --NA--; Used as an ideal base components of food supplements for patients with hypertension.
LHPGDAQR

SEQ ID NO: 980 - protein, 7 aa, Pisum sativum
  REGION 1..7: note = Antihypertensive; --NA--; "Shows antihypertensive activity, renin inhibition and significantly shows the fastest decrease in "
LSSGDVF

SEQ ID NO: 981 - protein, 5 aa, Pisum sativum
  REGION 1..5: note = Antihypertensive; --NA--; "Shows antihypertensive activity, renin inhibition and significantly shows the fastest decrease in "
LTFPG

SEQ ID NO: 982 - protein, 65 aa, Oryza sativa
  REGION 1..65: note = Antihypertensive; --NA--; Having antihypertensive activity used for the selection of transgenic lines containing large amoun
PGKIIAEKIIAEKIIAEKIIAEKIIAEKIIAEKIIAEKIIAEKIIAEKIIAEKIIAEKIIAEKPG

SEQ ID NO: 983 - protein, 48 aa, Oryza sativa
  REGION 1..48: note = Antihypertensive; --NA--; Having antihypertensive activity used for the selection of transgenic lines containing large amoun
PGKKIIAEKQRIIAEKQRIIAEKQRIIAEKQRIIAEKQRIIAEKQRPG

SEQ ID NO: 984 - protein, 94 aa, Oryza sativa
  REGION 1..94: note = Antihypertensive; --NA--; Having antihypertensive activity used for the selection of transgenic lines containing large amoun
PGKKIIAEKQRIIAEKQRIIAEKQRIIAEKQRIIAEKQRIIAEKQRPGKKIIAEKQRIIAEKQRIIAEKQRIIAEKQRIIAEKQRIIAEKQRPG

SEQ ID NO: 985 - protein, 6 aa, Zea mays
  REGION 1..6: note = Antihypertensive; --NA--; Inhibits angiotensin I converting enzyme (ACE).
PSGQYY

SEQ ID NO: 986 - protein, 6 aa, Glycine max
  REGION 1..6: note = Glycine max, Oryza sativa; Antihypertensive; --NA--; Reduced the blood pressure of spontaneously hypertensive rats after its oral administration. Oral
RPLKPW

SEQ ID NO: 987 - protein, 5 aa, Zea mays
  REGION 1..5: note = Antihypertensive; --NA--; Showing highest antimicrobial and antihypertensive activity.
VHLPP

SEQ ID NO: 988 - protein, 6 aa, Oryza sativa
  REGION 1..6: note = Antihypertensive; --NA--; Shows antihypertensive effect on spontaneously hypertensive rats at a dosage of 500 micro-g/kg.
AGPVLL

SEQ ID NO: 989 - protein, 6 aa, Terminalia chebula
  REGION 1..6: note = "Antihypertensive, ACE-inhibitor"; --NA--; ACE-inhibitory peptides maintain the gastrointestinal stability and reach the cardiovascular syste
DENSKF

SEQ ID NO: 990 - protein, 8 aa, Glycine max
  REGION 1..8: note = "Antihypertensive, ACE-inhibitor"; --NA--; Showing highest antimicrobial and antihypertensive activity.
VAHINVGK

SEQ ID NO: 991 - protein, 7 aa, Momordica charantia
  REGION 1..7: note = "Antihypertensive, ACE-inhibitor"; --NA--; ACE-inhibitory peptides maintain the gastrointestinal stability and reach the cardiovascular syste
VSGAGRY

SEQ ID NO: 992 - protein, 5 aa, Oryza sativa
  REGION 1..5: note = "Antihypertensive, ACE-inhibitor"; --NA--; Shows antihypertensive effect on spontaneously hypertensive rats at a dosage of 500 micro-g/kg.
QFYAV

SEQ ID NO: 993 - protein, 7 aa, Glycine max
  REGION 1..7: note = "Antihypertensive, ACE-inhibitor"; --NA--; Showing highest antimicrobial and antihypertensive activity.
PGTAVFK

SEQ ID NO: 994 - protein, 9 aa, Juglans regia
  REGION 1..9: note = "Antihypertensive, ACE-inhibitor"; --NA--; ACE-inhibitory peptides maintain the gastrointestinal stability and reach the cardiovascular syste
WPERPPQIP

SEQ ID NO: 995 - protein, 5 aa, Vigna radiata
  REGION 1..5: note = "Antihypertensive, ACE-inhibitor"; Bioactive peptides; inhibits angiotensin I-converting enzyme with the IC50 = 26.5 micro-M.
KDYRL

SEQ ID NO: 996 - protein, 8 aa, Vigna radiata
  REGION 1..8: note = "Antihypertensive, ACE-inhibitor"; Bioactive peptides; "BPs were used as angiotensin converting enzyme inhibitory, antioxidant, cancer preventing, and oth"
KLPAGTLF

SEQ ID NO: 997 - protein, 6 aa, Spinacia oleracea
  REGION 1..6: note = "Antihypertensive, ACE-inhibitor, Enzyme-inhibitor, Antioxidant"; ACE inhibitory peptide; inhibits angiotensin-I-converting-enzyme (IC50=0.38 micro-M); possesses antioxidative activity.
LRIPVA

SEQ ID NO: 998 - protein, 6 aa, Glycine max
  REGION 1..6: note = "Antihypertensive, ACE-inhibitor, Enzyme-inhibitor, Neuropeptide"; --NA--; "Used to inhibit the effect of hypertension, cleaves the C-terminal of histidyl-leucine of the inac"
NWGPLV

SEQ ID NO: 999 - protein, 11 aa, Chlorella vulgaris
  REGION 1..11: note = Chlorella vulgaris, Oryza sativa; "Antihypertensive, Anticancer, Antioxidant"; --NA--; --NA--
VECYGPNRPQF

SEQ ID NO: 1000 - protein, 12 aa, Mucuna pruriens
  REGION 1..12: note = "Antihypertensive, Antioxidant, Antithrombotic, Hypocholesterolemic"; Bioactive peptides; "It is used to inhibit the angiotensin-converting enzyme activity. Shows antihypertensives, antioxi"
HHLGGAKQAGDV

SEQ ID NO: 1001 - protein, 6 aa, Spinacia oleracea
  REGION 1..6: note = "Antihypertensive, Hypotensive, Antinociceptive, ACE-inhibitor"; Opioid; Rubiscolin enhanced memory consolidation at an oral dose and also exerted an anxiolytic-like effec
YPLDLF

SEQ ID NO: 1002 - protein, 5 aa, Amaranthus hypochondriacus
  REGION 1..5: note = Anti-inflammatory; --NA--; --NA--
DTEAR

SEQ ID NO: 1003 - protein, 9 aa, Annona montana
  REGION 1..9: note = Anti-inflammatory; --NA--; exhibits antiinflammatory activity in Vitro using the J774.1 macrophage model.
FPPTFNHVN

SEQ ID NO: 1004 - protein, 7 aa, Annona montana
  REGION 1..7: note = Anti-inflammatory; --NA--; exhibits antiinflammatory activity in Vitro using the J774.1 macrophage model.
GPTWANL

SEQ ID NO: 1005 - protein, 7 aa, Annona montana
  REGION 1..7: note = Anti-inflammatory; --NA--; exhibits antiinflammatory activity in Vitro using the J774.1 macrophage model.
PGLPYAN

SEQ ID NO: 1006 - protein, 8 aa, Annona squamosa
  REGION 1..8: note = Anti-inflammatory; --NA--; Inhibitory effect of cyclic peptides on the production of TNFR and IL-6 within LPS-stimulated J774
TTYLGAPA

SEQ ID NO: 1007 - protein, 7 aa, Jatropha mahafalensis
  REGION 1..7: note = "Antimalarial, Antiproliferative"; Orbitide; Shown to possess anti-malarial and antiproliferative activity.
GTILGVF

SEQ ID NO: 1008 - protein, 8 aa, Annona squamosa
  REGION 1..8: note = "Antimalarial, Immunosuppressive, Antifeedant, Cytotoxic"; Orbitide; "Shown to possess antimalarial, immunosuppressive, antifeedant and remarkable cytotoxic activity."
PALTTYGA

SEQ ID NO: 1009 - protein, 8 aa, Annona squamosa
  REGION 1..8: note = "Antimalarial, Immunosuppressive, Antifeedant, Cytotoxic"; Orbitide; "Shown to possess antimalarial, immunosuppressive, antifeedant and remarkable cytotoxic activity."
PGGVLSYY

SEQ ID NO: 1010 - protein, 9 aa, Annona squamosa
  REGION 1..9: note = "Antimalarial, Immunosuppressive, Antifeedant, Cytotoxic"; Orbitide; "Shown to possess antimalarial, immunosuppressive, antifeedant and remarkable cytotoxic activity."
PGGVLSYYY

SEQ ID NO: 1011 - protein, 8 aa, Annona squamosa
  REGION 1..8: note = "Antimalarial, Immunosuppressive, Antifeedant, Cytotoxic"; Orbitide; "Shown to possess antimalarial, immunosuppressive, antifeedant and remarkable cytotoxic activity."
PPITGLMQ

SEQ ID NO: 1012 - protein, 8 aa, Annona squamosa
  REGION 1..8: note = "Antimalarial, Immunosuppressive, Antifeedant, Cytotoxic"; Orbitide; "Shown to possess antimalarial, immunosuppressive, antifeedant and remarkable cytotoxic activity."
PPITGLMQ

SEQ ID NO: 1013 - protein, 7 aa, Annona squamosa
  REGION 1..7: note = "Antimalarial, Immunosuppressive, Antifeedant, Cytotoxic"; Orbitide; "Shown to possess antimalarial, immunosuppressive, antifeedant and remarkable cytotoxic activity."
PVPGSFG

SEQ ID NO: 1014 - protein, 8 aa, Annona squamosa
  REGION 1..8: note = "Antimalarial, Immunosuppressive, Antifeedant, Cytotoxic"; Orbitide; "Shown to possess antimalarial, immunosuppressive, antifeedant and remarkable cytotoxic activity."
PMTAIVGY

SEQ ID NO: 1015 - protein, 98 aa, Hybanthus floribundus
  REGION 1..98: note = Antimicrobial; Cyclotide; --NA--
AAFALPAIATLEKDVITPETIQAVLKKTGSPLSNIMLEEDVINAMVKSKTVISKTVLDEALLKHDGLGGIPCGESCVFIPCISGVIGCSCKSKVCYRN

SEQ ID NO: 1016 - protein, 98 aa, Hybanthus floribundus
  REGION 1..98: note = Antimicrobial; Cyclotide; --NA--
AAFALPAIATLEKDVITPKAIELILKKTNSPLSNIMLQEDALLNSLVKTKTMISNTVFEEALLKHSHHGLGGTPCAESCVYLPCFTGVIGCTCKDKVC

SEQ ID NO: 1017 - protein, 98 aa, Hybanthus floribundus
  REGION 1..98: note = Antimicrobial; Cyclotide; --NA--
AAFALPAIATLEKDVITPKAIELILKKTNTPLSNIMLEEDALVNAFVKSKTMISNTVFDEALLKHSNHGLGGSVPCGESCVYIPCFTGIAGCSCKSKV

SEQ ID NO: 1018 - protein, 98 aa, Gloeospermum blakeanum
  REGION 1..98: note = Antimicrobial; Cyclotide; --NA--
AAFALPAIATYEKDVITPAAIQLILKKTSPLMLEEDAINALLKSKTVISSTVFEEALLKNSNNGVGGSFPCGESCVFIPCISAIAGCSCKNKVCYKNS

SEQ ID NO: 1019 - protein, 98 aa, Gloeospermum blakeanum
  REGION 1..98: note = Antimicrobial; Cyclotide; --NA--
AAFALPALAAYEIKDVITRDAYEALLKRKTAPLSSVMLEEELIMDKTVISNPVLEEALLLYAQNKGLGGSAFGCGETCVKGKCNTPGCVCSWPVCKKN

SEQ ID NO: 1020 - protein, 90 aa, Hybanthus floribundus
  REGION 1..90: note = Antimicrobial; Cyclotide; --NA--
AAFALPALASFEKDIITPKAIQHLKADGDALNAILKTKTLISDTVYEALVLKNSHVNGIACGESCAYFGCWIPGCSCRNKVCYFNSLDEN

SEQ ID NO: 1021 - protein, 98 aa, Hybanthus floribundus
  REGION 1..98: note = Antimicrobial; Cyclotide; --NA--
AAFALPALASFEKDVITPRGIELMLKKTNFPLSNIMLEEDTMSALVKTKTLISDTVFDALLKNSHTNGGNIPCGESCIFFPCFNPGCSCKDNLCYYNS

SEQ ID NO: 1022 - protein, 86 aa, Hybanthus floribundus
  REGION 1..86: note = Antimicrobial; Cyclotide; --NA--
AAFALPALASFEKDVITPRGLEEDTMSALVKTKTLISDTVFDILLKNYHTNGGEIPCGESCVYLPCFLPNCYCRNHVCYLNSLVGN

SEQ ID NO: 1023 - protein, 98 aa, Gloeospermum pauciflorum
  REGION 1..98: note = Antimicrobial; Cyclotide; --NA--
AAFALPALASFGFEKDVVSAEAVEAALKKTNPNSNLRLSEDTISALTGKTVISQTIFDEVLLKNANHRVNGIPCAESCVWIPCTVTKMLGCSCKDKVC

SEQ ID NO: 1024 - protein, 98 aa, Gloeospermum pauciflorum
  REGION 1..98: note = Antimicrobial; Cyclotide; --NA--
AAFALPALASFSLGRDVIGAGAVHAALKKISPNSNIRLSKEAISALTGKTVISQTFFDEVILRNVDGGVNGVPCGESCVWVPCTVTALMGCSCVREVC

SEQ ID NO: 1025 - protein, 98 aa, Gloeospermum pauciflorum
  REGION 1..98: note = Antimicrobial; Cyclotide; --NA--
AAFALPALASSFEKDVISFRAIQAVLEKRGLSKLEDDPVLSALAHTKTIISNPVIEEALLNGANLKAGNGIPCAESCVWIPCTVTALIGCGCSNKVCY

SEQ ID NO: 1026 - protein, 98 aa, Gloeospermum blakeanum
  REGION 1..98: note = Antimicrobial; Cyclotide; --NA--
AAFALPALATFEKDVITPEAIHAVLKRTAPLSNIMLEGDAINALITGKTVISKTVLEEAFLNNGISGGVNGIPCGESCVFIPCITAAIGCSCKTKVCY

SEQ ID NO: 1027 - protein, 98 aa, Gloeospermum blakeanum
  REGION 1..98: note = Antimicrobial; Cyclotide; --NA--
AAFALPALATFEKDVITPETIQAVLKRTAPLSNIMLEGDAINALITGKTVISKTVLEEALLKNDGLGGVIPCGESCVFIPCISSVLGCSCKNKVCYRN

SEQ ID NO: 1028 - protein, 98 aa, Gloeospermum blakeanum
  REGION 1..98: note = Antimicrobial; Cyclotide; --NA--
AAFALPALATFERDVITPETIQAVLKMTNPNSNVMLEEDAINALTGKTVISKTVLEEALLNNANYGISDGFNGIPCGETCVFMPCISGPMGCSCKHMV

SEQ ID NO: 1029 - protein, 98 aa, Hybanthus floribundus
  REGION 1..98: note = Antimicrobial; Cyclotide; --NA--
AAFVLPAIATLEKDVITPKAIELILKKTNTPLSNITLQDDALVNALVKSKTMISNTVFEEALLKHSNHGLGGTPCGESCVYIPCFTAVVGCTCKDKVC

SEQ ID NO: 1030 - protein, 98 aa, Arachis diogoi
  REGION 1..98: note = Antimicrobial; Thaumatin; --NA--
AHGAQINVTNKCSYTVWPGSQANANSAQLSTTGFELPSGQSKTVDVPAPWSGKFWARTGCSNNNGVFSCATADCGNHLECSGAGEATPASLMEFTIAS

SEQ ID NO: 1031 - protein, 98 aa, Picea sitchensis
  REGION 1..98: note = Antimicrobial; Thaumatin; --NA--
ALGASLIFMAALYIYVQGVGCATFEIRNECSSTVWAAGIPHGGGKQLEKGQSWTVQFPAGTTGRFWGRTGCSFDGSGKGSCKTGDCGGLLNCQGSGGV

SEQ ID NO: 1032 - protein, 98 aa, Picea sitchensis; identical to SEQ ID NO: 1031
  REGION 1..98: note = Antimicrobial; Thaumatin; --NA--

SEQ ID NO: 1033 - protein, 98 aa, Picea sitchensis; identical to SEQ ID NO: 1031
  REGION 1..98: note = Antimicrobial; Thaumatin; --NA--

SEQ ID NO: 1034 - protein, 98 aa, Picea sitchensis
  REGION 1..98: note = Antimicrobial; Thaumatin; --NA--
ALGASLIFMAALYIYVQGVGCATFEIRNECSSTVWAAGIPHGGGKQLEKGQSWTVQVPAGTTGRFWGRTGCSFDGSGKGSCKTGDCGGLLNCQGSGGV

SEQ ID NO: 1035 - protein, 98 aa, Picea sitchensis; identical to SEQ ID NO: 1034
  REGION 1..98: note = Antimicrobial; Thaumatin; --NA--

SEQ ID NO: 1036 - protein, 98 aa, Picea sitchensis
  REGION 1..98: note = Antimicrobial; Thaumatin; --NA--
ALGVSLIFMAALYIYAQGVGCATFEIRNECSSTVWAAGIPHGGGKQLEKGQSWTVQVPAGTTGRFWGRTGCSFDGSGKGSCKTGDCGGLLNCQGSGGV

SEQ ID NO: 1037 - protein, 98 aa, Picea sitchensis
  REGION 1..98: note = Antimicrobial; Thaumatin; --NA--
ALGVSLIFMAALYIYVQGVGCATFEIRNECSSTVWAAGIPHGGGKQLEKGQSWTVQFPAGTTGRFWGRTGCSFDGSGKGSCKTGDCGGLLNCQGSGGV

SEQ ID NO: 1038 - protein, 98 aa, Picea sitchensis; identical to SEQ ID NO: 1037
  REGION 1..98: note = Antimicrobial; Thaumatin; --NA--

SEQ ID NO: 1039 - protein, 98 aa, Picea sitchensis
  REGION 1..98: note = Antimicrobial; Thaumatin; --NA--
ALGVSLIFMAALYIYVQGVGCATFEIRNECSSTVWAAGIPHGGGKQLEKGQSWTVQVPAGTTGRFWGRTGCSFDGSGKGSCKTGDCGGLLNCQGSGGV

SEQ ID NO: 1040 - protein, 49 aa, Solanum lycopersicum
  REGION 1..49: note = Antimicrobial; --NA--; --NA--
AQQICKAPSQTFPGLCFMDSSCRKYCIKEKFTGGHCSKLQRKCLCTKPC

SEQ ID NO: 1041 - protein, 98 aa, Glycine max
  REGION 1..98: note = Antimicrobial; Thaumatin; --NA--
ARFEITNRCTYTVWAASVPVGGGVQLNPGQSWSVDVPAGTKGARVWARTGCNFDGSGRGGCQTGDCGGVLDCKAYGAPPNTLAEYGLNGFNNLDFFDI

SEQ ID NO: 1042 - protein, 70 aa, Zea mays
  REGION 1..70: note = Antimicrobial; --NA--; --NA--
ARTTSGQTKEDSNARNMTMTKTRASGNILVSRNDDGPCYLDSGLNEYVCRKTNKCYKSLVLCVASCQPSS

SEQ ID NO: 1043 - protein, 98 aa, Thaumatococcus daniellii
  REGION 1..98: note = Antimicrobial; Thaumatin; --NA--
ATFEIVNRCSYTVWAAASKGDAALDAGGRQLNSGESWTINVEPGTNGGKIWARTDCYFDDSGSGICKTGDCGGLLRCKRFGRPPTTLAEFSLNQYGKD

SEQ ID NO: 1044 - protein, 40 aa, Nicotiana tabacum
  REGION 1..40: note = Antimicrobial; Thaumatin; --NA--
ATIEVRNNCPYTVWAASTPIGGGRRLDRGQTWVINAPRGT

SEQ ID NO: 1045 - protein, 37 aa, Nicotiana tabacum
  REGION 1..37: note = Antimicrobial; Thaumatin; --NA--
ATIEVRNNXPYTVWAASTPIGGGRRLDRGQTXVINAP

SEQ ID NO: 1046 - protein, 31 aa, Hybanthus floribundus
  REGION 1..31: note = Antimicrobial; Cyclotide; --NA--
CAETCIYIPCFTEAVGCKCKDKVCYKNSLDN

SEQ ID NO: 1047 - protein, 39 aa, Triticum kiharae
  REGION 1..39: note = Antimicrobial; --NA--; --NA--
CGDQARGAKCPNCLCCGKYGFCGSGDAYCGAGSCQSQCR

SEQ ID NO: 1048 - protein, 39 aa, Triticum kiharae
  REGION 1..39: note = Antimicrobial; --NA--; --NA--
CGDQARGAKCPNCLCCGKYGFCGSGDAYCGKGSCQSQCR

SEQ ID NO: 1049 - protein, 33 aa, Hybanthus enneaspermus
  REGION 1..33: note = Antimicrobial; Cyclotide; --NA--
CGESCVYIPCTVTALLGCSCKDKVCYKNSLAVN

SEQ ID NO: 1050 - protein, 31 aa, Hybanthus stellarioides
  REGION 1..31: note = Antimicrobial; Cyclotide; --NA--
CGETCIWGRCYSENIGCHCGFGICTLNSLDN

SEQ ID NO: 1051 - protein, 31 aa, Hybanthus epacroides
  REGION 1..31: note = Antimicrobial; Cyclotide; --NA--
CGETCIYIPCFTEAVGCKCKDKVCYKNSLDN

SEQ ID NO: 1052 - protein, 32 aa, Hybanthus monopetalus
  REGION 1..32: note = Antimicrobial; Cyclotide; --NA--
CGETCLFIPCIFSVVGCSCSSKVCYRNFLDMN

SEQ ID NO: 1053 - protein, 27 aa, Hybanthus vernonii
  REGION 1..27: note = Antimicrobial; Cyclotide; --NA--
CGETCLFIPCLTSVFGCSCKNRGCYKI

SEQ ID NO: 1054 - protein, 31 aa, Hybanthus floribundus
  REGION 1..31: note = Antimicrobial; Cyclotide; --NA--
CGETCVIFPCISAAFGCSCKDTVCYKNSLVN

SEQ ID NO: 1055 - protein, 31 aa, Hybanthus floribundus
  REGION 1..31: note = Antimicrobial; Cyclotide; --NA--
CGETCVILPCISAALGCSCKDTVCYKNSLVN

SEQ ID NO: 1056 - protein, 35 aa, Hybanthus monopetalus
  REGION 1..35: note = Antimicrobial; Cyclotide; --NA--
CGETCVTGTCYTPGCACDWPVCKRDALPIEPVKAF

SEQ ID NO: 1057 - protein, 30 aa, Hybanthus calycinus
  REGION 1..30: note = Antimicrobial; Cyclotide; --NA--
CGETCVVDTRCYTKKCSCAWPVCMRNSLAG

SEQ ID NO: 1058 - protein, 30 aa, Hybanthus epacroides
  REGION 1..30: note = Antimicrobial; Cyclotide; --NA--
CGETCVVLPCFIVPGCSCKSSVCYFNSLDN

SEQ ID NO: 1059 - protein, 28 aa, Hybanthus debilissimus
  REGION 1..28: note = Antimicrobial; Cyclotide; --NA--
CVWIPCISAAIGCSCKSKVCYRNSLDLN

SEQ ID NO: 1060 - protein, 27 aa, Hybanthus floribundus
  REGION 1..27: note = Antimicrobial; Cyclotide; --NA--
CVWIPCISGIAGCSCKNKVCYLNSLDN

SEQ ID NO: 1061 - protein, 98 aa, Arabidopsis thaliana
  REGION 1..98: note = Antimicrobial; Defensin; --NA--
DTCIDGLGYCNNCDERCKAKHGPSSESSCDRSVGVPLCKCYYECESPPSPPAPPKKCDGGAGICSQRCQGQCCDMNCAQKYIGGHGFCNTLGTFSFCQ

SEQ ID NO: 1062 - protein, 41 aa, Eucommia ulmoides
  REGION 1..41: note = Antimicrobial; --NA--; --NA--
ETCASRCPRPCNAGLCCSIYGYCGSGAAYCGAGNCRCQCRG

SEQ ID NO: 1063 - protein, 41 aa, Eucommia ulmoides
  REGION 1..41: note = Antimicrobial; --NA--; --NA--
ETCASRCPRPCNAGLCCSIYGYCGSGNAYCGAGNCRCQCRG

SEQ ID NO: 1064 - protein, 94 aa, Melicytus ramiflorus
  REGION 1..94: note = Antimicrobial; Cyclotide; --NA--
FAAYEIKDVISRNAVEGVLKKRVGFLSEEAINELAQGKTIISNPVLEEALVMYAKSKGLGGSAILCGESCTLGECYTPGCTCSWPICTKNSLDA

SEQ ID NO: 1065 - protein, 98 aa, Melicytus ramiflorus
  REGION 1..98: note = Antimicrobial; Cyclotide; --NA--
FAFFERDVITRETIEAVLKKTNPNSNTMLQDDAINALTGKTLISQTILEEALLKNGVVGGSIPCGESCVFIPCISSIVGCSCKSKVCYKNSLALPTLE

SEQ ID NO: 1066 - protein, 93 aa, Oldenlandia affinis
  REGION 1..93: note = Antimicrobial; Cyclotide; --NA--
FLGSVESSEIDAATTTRLMLNEIAEKWYLRKMMSGVGSSETVDKIFKRETNGRLTGSHCGETCFFFGCYKPGCSCDELRQCYKNELPPAEESH

SEQ ID NO: 1067 - protein, 98 aa, Morus alba
  REGION 1..98: note = Antimicrobial; Thaumatin; --NA--
FLIFLTHFFFSSNAATFTIRNDCSYTVWAAASPGGGRRLDRGQTWTLNVPAGTSMARIWGRTNCNFDAAGRGRCQTGDCGLLQCQGWGTPPNTLAEYA

SEQ ID NO: 1068 - protein, 98 aa, Viscum album
  REGION 1..98: note = Antimicrobial; Thionin; --NA--
FRNVESKSCCPNTTGRNIYNTCRLGGGSRERCASLSGCKIISASTCPSDYPKFYCTLGCQSSKCASITTPPNSEVDAEAVRCKAACSNLCDFGVTTNQ

SEQ ID NO: 1069 - protein, 15 aa, Pinus halepensis
  REGION 1..15: note = Antimicrobial; --NA--; --NA--
FSGSVNQACSGFGWK

SEQ ID NO: 1070 - protein, 43 aa, Zea mays
  REGION 1..43: note = Antimicrobial; --NA--; --NA--
GDSGVDAYVSRSGRGECRRQCLRRHEGQPWETQECMRRCRRRG

SEQ ID NO: 1071 - protein, 98 aa, Musa acuminata
  REGION 1..98: note = Antimicrobial; Thaumatin; --NA--
GTRSSXLSLSFFFFFFFSLLVTLSHAATFXIVNRCSYTVWAAAVPGGGRQLNQGQSWTINVNAGTTGGRIWGRTGCSFDGSGRGRCQTGDCGGVLSCT

SEQ ID NO: 1072 - protein, 94 aa, Clitoria ternatea
  REGION 1..94: note = Antimicrobial; Cyclotide; --NA--
IPCGESCVFIPCISTVIGCSCKNKVCYRNHVIAAEAKTMDDHHLLCQSHEDCITKGTGNFCAPFPDQDIKYGWCFRAESEGFMLKDHLKMSITN

SEQ ID NO: 1073 - protein, 94 aa, Clitoria ternatea
  REGION 1..94: note = Antimicrobial; Cyclotide; --NA--
IPCGESCVFIPCITGAIGCSCKSKVCYRNHVIAAEAKTMDDHHLLCQSHEDCITKGTGNFCAPFPDQDIKYGWCFRAESEGFMLKDHLKMSITN

SEQ ID NO: 1074 - protein, 98 aa, Oldenlandia affinis
  REGION 1..98: note = Antimicrobial; Cyclotide; --NA--
KSLVLCLLLAAFVGAFGAELSEADKANVVNEIAANIQREILKGVKTSETTLTMFLKEMQLKGLPVCGETCFGGTCNTPGCACDPWPVCTRNGLPRRAG

SEQ ID NO: 1075 - protein, 93 aa, Melicytus ramiflorus
  REGION 1..93: note = Antimicrobial; Cyclotide; --NA--
LAAYEIKDVISRNAIEGVLKKRVGFLSEEAINELGQGKTIISNPVLEEALVMYAKSKGLGGHPICGETCVGNKCYTPGCTCTWPVCYRNSLYA

SEQ ID NO: 1076 - protein, 93 aa, Melicytus ramiflorus
  REGION 1..93: note = Antimicrobial; Cyclotide; --NA--
LAAYEIKDVISRNAIEGVLKKRVGFLSEEAINGLALGKTIISNPVLEEALVMYAKSEGLGGHPTCGETCLLGTCYTPGCTCKRPVCYKNSLDA

SEQ ID NO: 1077 - protein, 98 aa, Melicytus ramiflorus
  REGION 1..98: note = Antimicrobial; Cyclotide; --NA--
LAFFERDVITPETIEAVLKKTNPSSNIMLQEDAINALTSKTLISQTILEEALLKNGVVGGSIPCGESCVYIPCISSLLGCSCESKVCYKNSLALPTLE

SEQ ID NO: 1078 - protein, 98 aa, Melicytus ramiflorus
  REGION 1..98: note = Antimicrobial; Cyclotide; --NA--
LAFFERDVITPETIEAVLKKTNPSSNIVLQEDAINALTGKTLISQTILEEALLKNGVVGGSIPCGESCVYIPCISSLLGCSCKSKVCYKNSLALPTLE

SEQ ID NO: 1079 - protein, 98 aa, Melicytus ramiflorus
  REGION 1..98: note = Antimicrobial; Cyclotide; --NA--
LAFFERDVITRETIEAVLKKINPNSNTMLQDDAINALTGKTLISQTILEEALLKNGVVGGSIPCGESCVFIPCISSIVGCSCKSKVCYKNSLALPTLE

SEQ ID NO: 1080 - protein, 98 aa, Melicytus ramiflorus
  REGION 1..98: note = Antimicrobial; Cyclotide; --NA--
LAIFERDVITPETIEAVLKKTNPNSNIMLQEDAINALTGKTLISKTILEEAFLKNGVVGGSIPCGESCVFIPCISSVVGCSCKNKVCYKNSLALPTLE

SEQ ID NO: 1081 - protein, 98 aa, Melicytus ramiflorus
  REGION 1..98: note = Antimicrobial; Cyclotide; --NA--
LALFERDVITRETVEAVLKKTNPNSNTMLQEDAINALTGKTLISQAILEEALLKNGVVGGSIPCGESCVFIPCISSIVGCSCKSKVCYKNSLALPTLE

SEQ ID NO: 1082 - protein, 98 aa, Melicytus ramiflorus
  REGION 1..98: note = Antimicrobial; Cyclotide; --NA--
LALFERDVITRETVEAVLKKTNPNSNTMLQEDAINALTGKTLISQTILEEALLKNGVVGGSIPCGEGCVFIPCISSIVGCSCKSKVCYKNSLALPTLE

SEQ ID NO: 1083 - protein, 98 aa, Melicytus ramiflorus
  REGION 1..98: note = Antimicrobial; Cyclotide; --NA--
LALFERDVVTHETIEAVLKKINPNSNTMLQEDAINALTGKTLISQTILEEALLKNAVVGGSIPCGESCVFIPCISSIVGCSCKSKVCYKNSLALPTLE

SEQ ID NO: 1084 - protein, 95 aa, Melicytus ramiflorus
  REGION 1..95: note = Antimicrobial; Cyclotide; --NA--
LATFEKDVITAETIQAVIKRTAPLSNIMLEGDAINALLTSKTVISKTVLEEAFLKTDATNGVIPCGESCVFIPCISSVLGCSCKNKVCYRNSLVN

SEQ ID NO: 1085 - protein, 98 aa, Melicytus ramiflorus
  REGION 1..98: note = Antimicrobial; Cyclotide; --NA--
LATFERDVITPETVHAILKKTNSNSNIMLHEDAIQALTGKTLISKTVLEEALLKNAENGLVGSGVPCGESCVWIPCLTSIVGCSCKNNVCTLNSLAQN

SEQ ID NO: 1086 - protein, 85 aa, Curcuma longa
  REGION 1..85: note = Antimicrobial; --NA--; --NA--
LCPLDVLQLSSELLDIDGNEVEASRILSDITAFGGIRCPLTVVQSRGIGTIISSPYRFIAEGHPLSLKDMDGWFRVSDDEFNNYK

SEQ ID NO: 1087 - protein, 98 aa, Tulipa gesneriana
  REGION 1..98: note = Antimicrobial; Thionin; --NA--
LGLVVAQTQVDAKSCCPSTAARNCYNVCRFPGTPRPVCAATCGCKIITGTKCPPDYPKLGWSTFQNSDVADKALDVVDEALHVAKEVMKEAVERCNNA

SEQ ID NO: 1088 - protein, 98 aa, Nicotiana tabacum
  REGION 1..98: note = Antimicrobial; Thaumatin; --NA--
LVFFLLAFVTYTYASGVFEVHNNCPYTVWAAATPVGGGRRLERGQSWWFWAPPGTKMARIWGRTNCNFDGAGRGWCQTGDCGGVLECKGWGKPPNTLA

SEQ ID NO: 1089 - protein, 98 aa, Hordeum vulgare
  REGION 1..98: note = Antimicrobial; Thaumatin; --NA--
MAASSSALIILLAAALTAGASARSFSITNRCSFTVWPAATPVGGGRQLNGGETWNLDIPDGTSSARIWGRTDCSFNGNSGRCGTGDCGGALSCTLSGQ

SEQ ID NO: 1090 - protein, 98 aa, Clitoria ternatea
  REGION 1..98: note = Antimicrobial; Cyclotide; --NA--
MAFARLALIFFLAASVMFAVKETEAGIPCGESCVFIPCTVTALLGCSCKDKVCYKNHVIAAEANTVNDHHLLCQSHEDCFKKGTGNFCAPSLKHDVKY

SEQ ID NO: 1091 - protein, 98 aa, Hordeum vulgare
  REGION 1..98: note = Antimicrobial; Thaumatin; --NA--
MAFSGVVHLIALVIAVAAAATDATTITVVNRCSYTIWPGALPGGGARLDPGQSWQLNMPAGTAGARVWPRTGCTFDRSGRGRCITGDCAGALVCRVSG

SEQ ID NO: 1092 - protein, 98 aa, Pinus monticola
  REGION 1..98: note = Antimicrobial; Thaumatin; --NA--
MAGRNSLSGSIWITVTVTLVAVNVYLQVAEGATFTVRNQCTYTVWAAASPGGGKALGQGQTWTFNVAAGTKGARIWGRTGCSFDASGRGRCNTGDCGG

SEQ ID NO: 1093 - protein, 98 aa, Zea mays
  REGION 1..98: note = Antimicrobial; Thaumatin; --NA--
MAGSVAIVGIFVALLAVAGEAAVFTVVNQCPFTVWAASVPVGGGRQLNRGESWRITAPAGTTAARIWARTGCKFDASGRGSCRTGDCGGVLQCTGYGR

SEQ ID NO: 1094 - protein, 79 aa, Petunia hybrida
  REGION 1..79: note = Antimicrobial; Cyclotide; --NA--
MAGVNSLRSALYLIILILFVQLTNFQESRVMAVELSRVFLPLSGIPCGESCVWMYCITATMGCSCRNKVCYKNEIIQEK

SEQ ID NO: 1095 - protein, 79 aa, Petunia hybrida
  REGION 1..79: note = Antimicrobial; Cyclotide; --NA--
MAGVNSLRSALYLIILILFVQLTNFQESRVMAVELSRVFLPLSGVPCGESCVWMYCISAAMGCSCRNKVCYRNEIIQEK

SEQ ID NO: 1096 - protein, 77 aa, Nicotiana tabacum
  REGION 1..77: note = Antimicrobial; --NA--; --NA--
MAGYPKVVATVFLMMMLVFATEMGPMVAEARTCESQSHRFKGLCFSKSNCASVCHTEGFYGGHCRGFRRRCFCTRHC

SEQ ID NO: 1097 - protein, 93 aa, Hedyotis biflora
  REGION 1..93: note = Antimicrobial; Cyclotide; --NA--
MAHFIKYLIMFLVIAACVGVLEVESAEADLTALGIRKMLDPPTEVGISFAAEIQFKKELLGRLKGIQCGESCVWIPCISSAWGCSCKNKICSS

SEQ ID NO: 1098 - protein, 98 aa, Arabidopsis thaliana
  REGION 1..98: note = Antimicrobial; Thaumatin; --NA--
MAIFSTSHLLFISFIIATCTISVSGTTFTLTNHCGSTIWPGILTANGAQLGDGGFALASGSSVTFTVSPGWSGRFWARTYCNFDASGSGKCGTGDCGS

SEQ ID NO: 1099 - protein, 98 aa, Arabidopsis thaliana
  REGION 1..98: note = Antimicrobial; Thaumatin; --NA--
MAIFSTSHLLFISFIIATCTISVSGTTFTLTNHCGSTIWPGILTANGAQLGDGGFALASGSSVTFTVSPGWSGRFWARTYCNFDASSSGKCGTGDCGS

SEQ ID NO: 1100 - protein, 98 aa, Gossypium barbadense
  REGION 1..98: note = Antimicrobial; Thaumatin; --NA--
MAISFGIYLLFLLNFFSFGAIFSSATSFTLENRCSFTVWPGSLTANGPPLGDGGFALAPGSSSRLHPPPGWSGRFWGRTGCNFDNSGSGKCVTGDCGG

SEQ ID NO: 1101 - protein, 98 aa, Hordeum vulgare
  REGION 1..98: note = Hordeum vulgare var. distichum; Antimicrobial; Thionin; --NA--
MAISKSIKSVVICVLILGLVLEHVQVEGKSCCKNTTGRNCYNTCRFAGGSRPVCATACGCKIISGPTCPRDYPKLSLLPESGEPNATEYCTIGCMTSV

SEQ ID NO: 1102 - protein, 77 aa, Chassalia chartacea
  REGION 1..77: note = Antimicrobial; Cyclotide; --NA--
MAKFANYLMLFLLVASLVMLEAQSSDTIKVPDLGKRLLMNRDPNGIPCAESCVWIPCTITALMGCSCKNNVCYNNEL

SEQ ID NO: 1103 - protein, 75 aa, Chassalia chartacea
  REGION 1..75: note = Antimicrobial; Cyclotide; --NA--
MAKFANYLMLFLLVASLVMLEAQSSDTLKVPDLGKRLLMNHDSNRVGIPCGESCVYIPCISAVLGCSCQNKVCYR

SEQ ID NO: 1104 - protein, 78 aa, Chassalia chartacea
  REGION 1..78: note = Antimicrobial; Cyclotide; --NA--
MAKFANYLTLFLLVASLVMMEVHSSSSTEVPDQGRRLLMNPDSNGIPCGESCVFIPCISALLGCSCSNKVCYNNRTKS

SEQ ID NO: 1105 - protein, 78 aa, Chassalia chartacea
  REGION 1..78: note = Antimicrobial; Cyclotide; --NA--
MAKFATQLFLLTASVVMLEVQSSIVIMQDPDLGRKLIMNPANGASCGETCFTGICFTAGCSCNPWPTCTRNGLNPESI

SEQ ID NO: 1106 - protein, 77 aa, Chassalia chartacea
  REGION 1..77: note = Antimicrobial; Cyclotide; --NA--
MAKFATQLLLFVLIASLVMLEVHASNTFQVPDLGKRLLMNRDPNGFPCAESCVYIPCTVTALLGCSCRNRVCYRNEL

SEQ ID NO: 1107 - protein, 77 aa, Chassalia chartacea
  REGION 1..77: note = Antimicrobial; Cyclotide; --NA--
MAKFATQLLLFVLIASLVMLEVHASNTFQVPDLGKRLLMNRDPNGIPCAESCVYIPCTITALFGCSCKDKVCYNNEL

SEQ ID NO: 1108 - protein, 77 aa, Chassalia chartacea
  REGION 1..77: note = Antimicrobial; Cyclotide; --NA--
MAKFATQLLLFVLIASLVMLEVHAVNTFQVPDLGKRLLMNRDPNGVPCAESCVYIPCTITALFGCSCKDKVCYNNEL

SEQ ID NO: 1109 - protein, 77 aa, Chassalia chartacea
  REGION 1..77: note = Antimicrobial; Cyclotide; --NA--
MAKFATQLLLFVLVASLVMLEVHAFNTFQVPDLGKRLLMNRDPNGIPCAESCVYIPCTITALLGCSCKDKVCYKNEL

SEQ ID NO: 1110 - protein, 98 aa, Arabidopsis thaliana
  REGION 1..98: note = Antimicrobial; Thaumatin; --NA--
MAKISSIHILFFVFITSGIADSATVFTLQNSCAYTVWPGTLSGNSITLGDGGFPLTPGASVQLTAPTGWSGRFWARTGCNFDASGHGTCVTGDCGGVL

SEQ ID NO: 1111 - protein, 98 aa, Arabidopsis thaliana; identical to SEQ ID NO: 1110
  REGION 1..98: note = Antimicrobial; Thaumatin; --NA--

SEQ ID NO: 1112 - protein, 98 aa, Arabidopsis thaliana
  REGION 1..98: note = Antimicrobial; Thaumatin; --NA--
MAKTSIPLAASFLLLISFSSAVDTSRLFLTVVNNCPFTVWPAIQPNAGHPVLEKGGFALPTFTHRSFNVPTTHWSGRIWARTWCAHYNGKFSCLTGDC

SEQ ID NO: 1113 - protein, 98 aa, Arabidopsis thaliana
  REGION 1..98: note = Antimicrobial; Thaumatin; --NA--
MAKTSLPLAASFLLLISFSSAVDTSRLFLTVVNNCPFTVWPAIQPNAGHPVLEKGGFALPTFTHRSFNVPTTHWSGRIWARTWCAHYNGKFSCLTGDC

SEQ ID NO: 1114 - protein, 98 aa, Arabidopsis thaliana
  REGION 1..98: note = Antimicrobial; Thaumatin; --NA--
MALPLPLIFLIFSHLFVSGVRSTSFIMVNKCEYTVWPGLLSNAGVPPLPTTGFVLQKGEERTISAPTSWGGRFWGRTQCSTDTDGKFTCLTGDCGSGT

SEQ ID NO: 1115 - protein, 98 aa, Lepidium latifolium
  REGION 1..98: note = Antimicrobial; Thaumatin; --NA--
MALPLPLIVLFFSHLFVSGVRSTSFIMMNKCEYTVWPGLLSNAGVAPLPTTGFVLQKGEEKTIDAPTSWGGRFWGRTQCTTDTDGKFTCETGDCGSGK

SEQ ID NO: 1116 - protein, 98 aa, Brassica campestris
  REGION 1..98: note = Antimicrobial; Thaumatin; --NA--
MALTLPLIFLLLSHFFFPGVEPTSFVMVNKCEYTVWPGLLSNAGVPPLPTTGFVLQKGEEQTIDAPASWGGRFWGRTLCSTGTDGKFSCATGDCGSGT

SEQ ID NO: 1117 - protein, 98 aa, Zea mays
  REGION 1..98: note = Antimicrobial; Thaumatin; --NA--
MAMAVAHLLPQLSAEGNGASRNRMAILLILHLFLLTVLCSITDSALGVDGAASFIFTNACKHAVWVGALHGASSPPLARSGFYLAPSATSSMDAPSSG

SEQ ID NO: 1118 - protein, 98 aa, Prunus persica
  REGION 1..98: note = Antimicrobial; Thaumatin; --NA--
MAMFTSKLKLSLLLFLFSLAAGNVVYATVFTLQNRCTYTVWPGTLSGNGAAVLGDGGFALAPDSSVQLTAPRGWSGRFWARTGCNFDDSGNGKCLTGD

SEQ ID NO: 1119 - protein, 98 aa, Arabidopsis thaliana
  REGION 1..98: note = Antimicrobial; Thaumatin; --NA--
MANISSIHILFLVFITSGIAVMATDFTLRNNCPTTVWAGTLAGQGPKLGDGGFELTPGASRQLTAPAGWSGRFWARTGCNFDASGNGRCVTGDCGGLR

SEQ ID NO: 1120 - protein, 98 aa, Petunia hybrida
  REGION 1..98: note = Antimicrobial; Thaumatin; --NA--
MANLTTSFVFFLLAYVTCTYAISIEVRNNCPYTVWAASTPIGGGRRLDRGQTWVINAPAGTKMARIWGRTKCNFNAAGRGSCQTGDCGGVLQCTGWGK

SEQ ID NO: 1121 - protein, 78 aa, Nicotiana tabacum
  REGION 1..78: note = Antimicrobial; --NA--; --NA--
MANSMRFFATVLLLTLLVMATEMGPMTIAEARTCESQSHRFKGPCSRDSNCATVCLTEGFSGGDCRGFRRRCFCTRPC

SEQ ID NO: 1122 - protein, 98 aa, Arabidopsis thaliana
  REGION 1..98: note = Antimicrobial; Thaumatin; --NA--
MANYSSIHILFLVFITSGIAVSAATVFTLQNSCPYTVWPGILSGNDNTLGDGGFPLTPGASVQLTAPAGWSGRFWARTGCNFDASGHGNCGTGDCGGV

SEQ ID NO: 1123 - protein, 98 aa, Prunus persica
  REGION 1..98: note = Antimicrobial; Thaumatin; --NA--
MAPLASLLVSLLTILGLFTSGVLSTTFTMVNKCEYTVWPGILTNAGVPPLPTTGFALQKGETKTISAPTSWGGRFWGRTLCSQDSTGKFSCVTGDCGS

SEQ ID NO: 1124 - protein, 98 aa, Hordeum vulgare
  REGION 1..98: note = Antimicrobial; Thionin; --NA--
MAPSKSIKSVVICVLILGLVLEQVQVEGKSCCKDTLARNCYNTCHFAGGSRPVCAGACRCKIISGPKCPSDYPKLNLLPESGEPDVTQYCTIGCRNSV

SEQ ID NO: 1125 - protein, 98 aa, Cryptomeria japonica
  REGION 1..98: note = Antimicrobial; Thaumatin; --NA--
MARAILWVLLTVMAVSLLLHAGVEGVNFDIENQCPYTVWAAGTPFGGGIELKRGQSWRVNVPGGARGRFWGRTGCSFDGNGRGRCNTGDCGGLLNCQG

SEQ ID NO: 1126 - protein, 98 aa, Pinus monticola
  REGION 1..98: note = Antimicrobial; Thaumatin; --NA--
MARALGVLFTFMAALYICVQGVGCATFEIQNECPFTVWAAGTPGVGGKQLERGQSWTVQFPAGTTGRFWGRTGCSFDGSGKGSCKTGDCGGLLNCQGS

SEQ ID NO: 1127 - protein, 98 aa, Cryptomeria japonica
  REGION 1..98: note = Antimicrobial; Thaumatin; --NA--
MARAMHTVWIALVPTLFVFLQGINVKAATFDITNQCPYTVWAAASPGGGRQLAKGQTWTIQVPAGTTGGRVWARTGCSFDRSGRGTCQTGDCNGMLSC

SEQ ID NO: 1128 - protein, 98 aa, Zea mays
  REGION 1..98: note = Antimicrobial; Thaumatin; --NA--
MARCPAAHAALCSLALLLLLPAARAATFTMTNNCGYTVWPGLLSGAGTAPLPTTGFALAHGASAAVDAPAGWSGRMWARTLCAADAATGRFSCATGDC

SEQ ID NO: 1129 - protein, 98 aa, Zea mays
  REGION 1..98: note = Antimicrobial; Thaumatin; --NA--
MARCPAAHAALCSLALLLLLPAARAATFTMTNNCGYTVWPGLLSGAGTAPLPTTGFALAHGASAAVDAPAGWSGRVWARTLCAADAATGRFSCATGDC

SEQ ID NO: 1130 - protein, 98 aa, Oryza sativa
  REGION 1..98: note = Oryza sativa subsp. Japonica; Antimicrobial; Thaumatin; --NA--
MASAPAASPAVLVVVVLVATLAAGGANAATFTITNRCSFTVWPAATPVGGGTQLNPGQTWTINVPAGTSSGRVWGRTGCNFDGAGRGGCATGDCGGAL

SEQ ID NO: 1131 - protein, 98 aa, Arabidopsis thaliana
  REGION 1..98: note = Antimicrobial; Thaumatin; --NA--
MASINLFLFAFLLLLSHASASTVIFYNKCKHPVWPGIQPSAGQNLLAGGGFKLPANKAHSLQLPPLWSGRFWGRHGCTFDRSGRGHCATGDCGGSLSC

SEQ ID NO: 1132 - protein, 98 aa, Hordeum vulgare
  REGION 1..98: note = Antimicrobial; Thaumatin; --NA--
MASLPTSSVLLPILLLVLVAATADAATFTVINKCQYTVWAAAVPAGGGQKLDAGQTWSINVPAGTTSGRVWARTGCSFDGAGNGRCQTGDCGGKLRCT

SEQ ID NO: 1133 - protein, 98 aa, Clitoria ternatea
  REGION 1..98: note = Antimicrobial; Cyclotide; --NA--
MASLRIAPFALFLFLAASVMFAVEKTEAGVIPCGESCVFIPCISTVIGCSCKNKVCYRNHIIAAEAKTMDEHILLCQSHEDCIAKGTGNFCAPFPDQD

SEQ ID NO: 1134 - protein, 98 aa, Clitoria ternatea
  REGION 1..98: note = Antimicrobial; Cyclotide; --NA--
MASLRIAPLALFFFLAASVMFTVEKTEAGIPCGESCVFIPCITGAIGCSCKSKVCYRDHVIAAEAKTMDDHHLLCQSHEDCITKGTGNFCASFPEQDI

SEQ ID NO: 1135 - protein, 98 aa, Cryptomeria japonica
  REGION 1..98: note = Antimicrobial; Thaumatin; --NA--
MASLRLATLAMMVLFGSCRAGATVFTLVNKCSYTVWPGTLSGSGSSVLGEGGFTLAPGQSVPLTASSRWSGRFWGRTDCSFDASGKGSCITGDCGNVL

SEQ ID NO: 1136 - protein, 98 aa, Oryza sativa
  REGION 1..98: note = Oryza sativa subsp. Japonica; Antimicrobial; Thaumatin; --NA--
MASPAAFPAVLVVVLVASLAAGGANAATFTITNRCSFTVWPAATPVGGGTQLNPGQTWTINVPAGTSSGRVWGRTGCSFDGAGRGRCATGDCGGALSC

SEQ ID NO: 1137 - protein, 98 aa, Oryza sativa
  REGION 1..98: note = Oryza sativa subsp. Japonica; Antimicrobial; Thaumatin; --NA--
MASPATSSAVLVVVLVATLAAGGANAATFTITNRCSFTVWPAATPVGGGVQLSPGQTWTINVPAGTSSGRVWGRTGCSFDGSGRGSCATGDCAGALSC

SEQ ID NO: 1138 - protein, 98 aa, Zea mays
  REGION 1..98: note = Antimicrobial; Thaumatin; --NA--
MASPKPLLLLATSFLSCGLLVAADYAPMTLTVVNNCPYPVWPGIQANSGHDVLEGGGFFLPPLSHKSFPAPAHPWSGRIWARTGCAGAGAQLHCATGD

SEQ ID NO: 1139 - protein, 98 aa, Brassica rapa
  REGION 1..98: note = Brassica rapa subsp. Chinensis; Antimicrobial; Thaumatin; --NA--
MASRNLFNFALLLLISRASASTVVFFNKCRYPVWPGIQPIAAQNILAGGGFKLPANKAYTLQLPPLWSGRFWGRHGCTFDGSGRGRCATGDCGGSLTC

SEQ ID NO: 1140 - protein, 98 aa, Brassica campestris; identical to SEQ ID NO: 1139
  REGION 1..98: note = Antimicrobial; Thaumatin; --NA--

SEQ ID NO: 1141 - protein, 98 aa, Triticum monococcum
  REGION 1..98: note = Antimicrobial; Thaumatin; --NA--
MASSHLAAAASMVLFLAVFAASTNAATFNIKNNCPYTVWPAATPIGGGRQLNTGETWTLDVPANTPSGRVWGRTGCNFNGNSGSCQTADCGGALSCTL

SEQ ID NO: 1142 - protein, 98 aa, Triticum aestivum; identical to SEQ ID NO: 1141
  REGION 1..98: note = Antimicrobial; Thaumatin; --NA--

SEQ ID NO: 1143 - protein, 98 aa, Hordeum vulgare
  REGION 1..98: note = Antimicrobial; Thaumatin; --NA--
MASSHVVSLLAGLLLAALAASTDAATITVVNRCSYTVWPGALPGGGVRLDPGQSWALNMPAGTAGARVWPRTGCTFDGSGRGRCITGDCGGALACRVS

SEQ ID NO: 1144 - protein, 98 aa, Brassica campestris
  REGION 1..98: note = Antimicrobial; Thaumatin; --NA--
MASSISLFLLPLILLLSHASEASTVIFYNKCTYTVWPGIQASSGQPLLAGGGFKLSPKRAYTLQLPSLWSGRFWGRHGCSFDRSGRGRCATGDCGGSL

SEQ ID NO: 1145 - protein, 98 aa, Phaseolus vulgaris
  REGION 1..98: note = Antimicrobial; Thaumatin; --NA--
MASSLFLCTFFILAVTTLTSPTAALILTLVNNCNYTVWPAIQPNAGHPVLAGGGFTLHTLTHQSIPVPDVHWSGRVWARTGCTYSGTAFSCASGDCGG

SEQ ID NO: 1146 - protein, 98 aa, Hordeum vulgare
  REGION 1..98: note = Antimicrobial; Thaumatin; --NA--
MASSRVVYLLAGLLLAALAATTDAATITVVNRCSYTVWPGALPGGGVRLDPGQSWALNMPAGTAGARVWPRTGCTFDGSGRGRCITGDCNGVLACRVS

SEQ ID NO: 1147 - protein, 98 aa, Solanum lycopersicum
  REGION 1..98: note = Antimicrobial; Thaumatin; --NA--
MASSSAKILLPLSLLFTLLSLSQSTNPNFILTLVNNCPYTIWPAIQPNAGHPVLERGGFTLHSLTHRSFPAPNAHWSGRIWARTGCNYQHGKFYCATG

SEQ ID NO: 1148 - protein, 98 aa, Arabidopsis thaliana
  REGION 1..98: note = Antimicrobial; Thaumatin; --NA--
MASSSSLFLLPLLLLVSQASASTVIFYNKCTYTVWPGIQPSSGQSLLAGGGFKLSPNRAYTLQLPPLWSGRFWGRHGCSFDRSGRGRCATGDCGGSFL

SEQ ID NO: 1149 - protein, 98 aa, Avena sativa
  REGION 1..98: note = Antimicrobial; Thaumatin; --NA--
MASSSVLQLLPLLMLAITIATTDAATITVVNKCSYTVWPGALPGGGVRLDPGKSWALNMPAGTRGARVWPRTGCTFDASGRGHCVTGDCGGALACRVS

SEQ ID NO: 1150 - protein, 98 aa, Ziziphus jujuba
  REGION 1..98: note = Antimicrobial; Thaumatin; --NA--
MASSVSLAFLLTTFLILCTICHATNPAMILTLVNNCPFTVWPAIQPNSGHDVLERGGFALHTLTHRSFPAPNHYWSGRIWARTGCTYSNNRFSCATGD

SEQ ID NO: 1151 - protein, 98 aa, Citrus jambhiri
  REGION 1..98: note = Antimicrobial; Thaumatin; --NA--
MASTSPIFISATILLLLSSYAKASFILTLVNNCPFPVWPAIQPNAGHPVLERGGFYLHSLTHRSFPAPAQHWSGRIWARTGCTYAHGKFSCVTGDCGH

SEQ ID NO: 1152 - protein, 98 aa, Zea mays
  REGION 1..98: note = Antimicrobial; Thaumatin; --NA--
MASVLHHLFPLVVVLLLAAAADAATFTVTNNCPYTVWAAAVPGGGQQLDNGQTWSIDVPAGTTGGRVWARTGCSFDGSGNGQCQTGDCGGVLQCAQYG

SEQ ID NO: 1153 - protein, 98 aa, Populus trichocarpa
  REGION 1..98: note = Antimicrobial; Thaumatin; --NA--
MATATQLFTCALLISCTLFHVARPELIITLVNNCHFTIYPAIQPNAGHPVLEKGGFPLQTLTHRSFRAPDQLWSGRIWGRTGCAHSNGKFHCVTGDCN

SEQ ID NO: 1154 - protein, 98 aa, Sequoia sempervirens
  REGION 1..98: note = Antimicrobial; Thaumatin; --NA--
MATATVVWIALVATLSVFLQGVNVKAATFEITNKCAYTVWAAAIPGGGRKLTKGQSWTINVAAGTTLGRIWGRTGCSFDASGRGNCQTGGCNGLLNCK

SEQ ID NO: 1155 - protein, 98 aa, Taxus x media
  REGION 1..98: note = Taxus x media; Antimicrobial; Thaumatin; --NA--
MATISVSGLGHLVLLLGIAVSVYVKEAGAAKFEITNQCSYTVWAAGTPGGGQQLQTGETWSVDVAAGTAAGRFWGRTGCSFDGNGRGSCQTGDCGGLL

SEQ ID NO: 1156 - protein, 98 aa, Taxus x media
  REGION 1..98: note = Taxus x media; Antimicrobial; Thaumatin; --NA--
MATISVSGLGHLVLLLGIAVSVYVQEAGAAKFEITNQCSYTVWAAGTPGGGQQLQTGETWSVDVAAGTAAGRFWGRTGCSFDGNGRGSCQTGDCGGLL

SEQ ID NO: 1157 - protein, 98 aa, Taxus x media; identical to SEQ ID NO: 1156
  REGION 1..98: note = Taxus x media; Antimicrobial; Thaumatin; --NA--

SEQ ID NO: 1158 - protein, 98 aa, Taxus x media; identical to SEQ ID NO: 1156
  REGION 1..98: note = Taxus x media; Antimicrobial; Thaumatin; --NA--

SEQ ID NO: 1159 - protein, 98 aa, Taxus x media
  REGION 1..98: note = Taxus x media; Antimicrobial; Thaumatin; --NA--
MATISVSGLGHLVLLLGVAVSVYVQEAGAAKFEITNQCSYTVWAAGTPGGGQQLQTGETWSVDVAAGTAAGRFWGRTGCSFDGNGRGSCQTGDCGGLL

SEQ ID NO: 1160 - protein, 98 aa, Hordeum vulgare
  REGION 1..98: note = Antimicrobial; Thionin; --NA--
MATNKSIKSVVICVLILGLVLEQVQVEAKSCCKNTTGRNCYNACRFAGGSRPVCATACGCKIISGPTCPRDYPKLNLLPESGEPNATEYCTIGCRTSV

SEQ ID NO: 1161 - protein, 98 aa, Hordeum vulgare
  REGION 1..98: note = Antimicrobial; Thionin; --NA--
MATNKSIKSVVICVLILGLVLEQVQVEGKSCCKNTTGRNCYNACHFAGGSRPVCATACGCKIISGPTCPRDYPKLNLLPESGEPNATEYCTIGCRTSV

SEQ ID NO: 1162 - protein, 98 aa, Hordeum vulgare
  REGION 1..98: note = Antimicrobial; Thionin; --NA--
MATNKSIKSVVICVLILGLVLEQVQVEGKSCCKNTTGRNCYNACRFAGGSRPVCATACGCKIISGPTCPRDYPKLNLLPESGEPNVTEYCTIGCRTSV

SEQ ID NO: 1163 - protein, 98 aa, Oryza sativa
  REGION 1..98: note = Oryza sativa subsp. Japonica; Antimicrobial; Thaumatin; --NA--
MATPLLLVVNAILIMAITACGGGGGNGGIQLIMVNNCGESVWPGLLGTAGHPTPQSGGFHLGAGEEAALEVPAGWSGRVWPRRGCSFDSRGRGSCATG

SEQ ID NO: 1164 - protein, 98 aa, Secale cereale
  REGION 1..98: note = Antimicrobial; Thaumatin; --NA--
MATSAVLFLLFAVFAAGASAATFNIKNNCGSTIWPAGIPVGGAFALGSGQTSSINVPAGTQAGRIWARTGCSFNGGTGSCQTGDCGGQLSCSLSGRPP

SEQ ID NO: 1165 - protein, 98 aa, Triticum aestivum
  REGION 1..98: note = Antimicrobial; Thaumatin; --NA--
MATSAVLFLLLAVFAAGASAATFNIKNNCGSTIWPAGIPVGGGFELGAGQTSSINVPAGTKAGRIWARTGCSFNGGSGSCRTGDCGGQLSCSLSGRPP

SEQ ID NO: 1166 - protein, 98 aa, Avena sativa
  REGION 1..98: note = Antimicrobial; Thionin; --NA--
MATSKGIKSAVICFLMLGLVLEQVQVEGKSCCKSTTAINCYNVCRLAGAPRPVCAGPCGCKLLDVTTCPSDWPKQHLLSEYGEADAAEYCTIGCMTSV

SEQ ID NO: 1167 - protein, 98 aa, Triticum aestivum
  REGION 1..98: note = Antimicrobial; Thaumatin; --NA--
MATSPVLFLLLAVFAAGASAATFNIKNNCGFTIWPAGIPVGGGFALGSGQTSSINVPAGTQAGRIWARTGCSFNGGSGSCQTGDCGGQLSCSLSGRPP

SEQ ID NO: 1168 - protein, 98 aa, Curcuma amada
  REGION 1..98: note = Antimicrobial; Thaumatin; --NA--
MATSTNAALCFFLFLLPLSINAATFEIVNRCSFTVWAAWATTGPRAGGGNQLNSGQSWTININAGTTGGRIWARTGCSFDGSGRGNCQTGDCGGVLQC

SEQ ID NO: 1169 - protein, 98 aa, Zingiber officinale
  REGION 1..98: note = Antimicrobial; Thaumatin; --NA--
MATSTSAVLCFFLFLLPLSINAATFQIVNSCSFTVWAAWATTGPRAGGGNQLNPGQSWTININAGATGGRIWPRTGCSSDGRNCQTGDCGMLQCQGYG

SEQ ID NO: 1170 - protein, 98 aa, Avena sativa
  REGION 1..98: note = Antimicrobial; Thionin; --NA--
MATTKGLKCVVLCVLVLGLVLGQVQVEGKSCCPSTSARNCYNVCRLTGTSRPRCASLCGCKIVDGTCPDGYSKLHLLLESGEPDVTEYCTIGCMTSVC

SEQ ID NO: 1171 - protein, 98 aa, Thuja occidentalis
  REGION 1..98: note = Antimicrobial; Thaumatin; --NA--
MATVSDLALLLVAGLAISLCTQEAGAVKFNIRNQCGYTVWAAGLPGGGKQLDQGQTWSVDVAAGTKGARFWGRTGCSFDGSGRGSCQTGDCGGQLSCT

SEQ ID NO: 1172 - protein, 98 aa, Zea mays
  REGION 1..98: note = Antimicrobial; Thaumatin; --NA--
MAVAHLLLQLSAGVNGASRNRMLIPAILSILQLIHLAALGVDGAASFRFTNACQHPVWVGALHGASSPPLASSGFYLARSATSRLDAPSSGTWSGTFW

SEQ ID NO: 1173 - protein, 98 aa, Glycine max
  REGION 1..98: note = Antimicrobial; Thaumatin; --NA--
MAVTKSLSIFLFIAISCVAVAQAANFNITNNCTYTVRAAAVPGGGSRLNPGESWNISVTNGTTGGRIWGRTNCTFDNAGRGKCLTGDCDGVLECNKTG

SEQ ID NO: 1174 - protein, 98 aa, Solanum commersonii
  REGION 1..98: note = Antimicrobial; Thaumatin; --NA--
MAYLRSSFVFFLLAFVTYTYAATIEVRNNCPYTVWAASTPIGGGRRLDRGQTWVINAPRGTKMARIWGRTNCNFDGAGRGSCQTGDCGGVLQCTGWGK

SEQ ID NO: 1175 - protein, 98 aa, Solanum phureja; identical to SEQ ID NO: 1174
  REGION 1..98: note = Antimicrobial; Thaumatin; --NA--

SEQ ID NO: 1176 - protein, 98 aa, Clitoria ternatea
  REGION 1..98: note = Antimicrobial; Cyclotide; --NA--
MAYVRLACLAVIFFFAASVMFTVEAGIPCGESCVFIPCISSVVGCSCKSKVCYNNHVIAAEANSVDDHHLLCQSHDDCIKKGTGNFCAPFLDHAVQYG

SEQ ID NO: 1177 - protein, 98 aa, Clitoria ternatea
  REGION 1..98: note = Antimicrobial; Cyclotide; --NA--
MAYVRLACLAVIFFFAASVMFTVEAGIPCGESCVFIPCLTTVVGCSCKNKVCYNNHVIAAEANSIDDHHLLCQSHDDCIKKGTGNFCAPFLDHAVQYG

SEQ ID NO: 1178 - protein, 98 aa, Clitoria ternatea
  REGION 1..98: note = Antimicrobial; Cyclotide; --NA--
MAYVRLTSLAVLFFLAASVMLNVKKTEGGEFLKCGESCVQGECYTPGCSCDWPICKKNHIIATNAKTVNQHRLLCESHEDCFKKGTGNYCAFFPDSDV

SEQ ID NO: 1179 - protein, 98 aa, Vicia faba
  REGION 1..98: note = Antimicrobial; Thaumatin; --NA--
MCLLLYTVVGGAKVTFTNKCVYTVWPGTLTGDQKPQLSTTGFVLNPQATNITDLPSPWSGRFWGRTGCSNNNGKFSCATADCASGQVECNGAGAIPPA

SEQ ID NO: 1180 - protein, 98 aa, Viola baoshanensis
  REGION 1..98: note = Antimicrobial; Cyclotide; --NA--
MDAKKMFLALVLIATFAVIPSFATFEKDFISPEAVQAILKKRAPLSNIMLEEDAMSALIKSKTVISNPVIEEALLKNSNSLHGIPCAESCVYLPCVTI

SEQ ID NO: 1181 - protein, 98 aa, Viola baoshanensis
  REGION 1..98: note = Antimicrobial; Cyclotide; --NA--
MDAKKMFLALVLIATFAVIPSFATFEKDIISPETIQAVLEKTAPHLKDAMNAIIKSKTVISNPVIEEALLKNSNGLKGAGCIETCYTFPCISEMINCS

SEQ ID NO: 1182 - protein, 98 aa, Viola baoshanensis
  REGION 1..98: note = Antimicrobial; Cyclotide; --NA--
MDAKKMFLALVLIATFAVIPSLATFEKDFITREAIQAILKKSAPLSNIMLEEDVMNALIKSKSVISNPVIEEALLKNNNGLNGIPCGESCVWIPCISS

SEQ ID NO: 1183 - protein, 98 aa, Viola baoshanensis
  REGION 1..98: note = Antimicrobial; Cyclotide; --NA--
MDAKKMFVALVLVATFVLPSLATFEKDFITPETIQAILKKSAPLSNIMLEEDVINALLKSKTVISNPIIEEAFLKNSNGLNGIPCGESCVWIPCISGA

SEQ ID NO: 1184 - protein, 98 aa, Arabidopsis thaliana
  REGION 1..98: note = Antimicrobial; Thaumatin; --NA--
MDLAKVSCFLLAIMFFINGGSSTTFTIVNQCNYTVWPGLLSGAGTAPLPTTGFSLNSFESRLISIPAAWSGRIWGRTLCNQNEITGIFTCVTGDCGSS

SEQ ID NO: 1185 - protein, 98 aa, Viola baoshanensis
  REGION 1..98: note = Antimicrobial; Cyclotide; --NA--
MDSKIVFVALVLIATFALPPLATFEKYFITTEAVRAILQKTNSNAMPSENAINALTGKTLISSVVLEEALLKNLDHGRNGVPCGESCVWIPCLTSAIG

SEQ ID NO: 1186 - protein, 98 aa, Viola baoshanensis
  REGION 1..98: note = Antimicrobial; Cyclotide; --NA--
MDSKIVFVALVLIATFALPSLATFEKDFITPEAVKAILKKTNANVMPSEDAINALTGKTVISNVVLEEALLKNLDNGLNGIPCGESCVWIPCLTAAIG

SEQ ID NO: 1187 - protein, 98 aa, Viola baoshanensis
  REGION 1..98: note = Antimicrobial; Cyclotide; --NA--
MDSKIVFVALVLIATFALPSLATFEKDFITPEAVRAILKKTNANVMPSEDAINALTGKTVISNVLLEEALLKNLDNGLNGIPCGESCVWIPCLTAAIG

SEQ ID NO: 1188 - protein, 98 aa, Viola baoshanensis
  REGION 1..98: note = Antimicrobial; Cyclotide; --NA--
MDSKIVFVALVLIATFALPSLATFEKDFITTEAVRSILQKTNSNAMPSEDAINALTGKTLISSVVLEEALLKNLDNGRNGIPCGESCVLIPCISSVIG

SEQ ID NO: 1189 - protein, 98 aa, Viola baoshanensis
  REGION 1..98: note = Antimicrobial; Cyclotide; --NA--
MDSKIVFVALVLIATFALPSLATFEKDFITTEAVRSILQKTNSNAMPSEDAINALTGKTLLSSVVLEEALLKNLDNGRNGIPCGESCVWIPCLTATIG

SEQ ID NO: 1190 - protein, 98 aa, Viola baoshanensis
  REGION 1..98: note = Antimicrobial; Cyclotide; --NA--
MDSKIVFVALVLIATFALPSLATFEKDFITTETVRAILKKTNSNTMPSEDAINALTGKTLISSVVLDEALLKNLDNGLNGVIPCGESCVFIPCISSVI

SEQ ID NO: 1191 - protein, 98 aa, Viola baoshanensis
  REGION 1..98: note = Antimicrobial; Cyclotide; --NA--
MDSKIVFVALVLIATFALPTLATFEKDFITTEAVRAILKKTNANVMPSEDVINALTGKTVISNVVLEETLVMKLDNGLTGIPCGEGCVYLPCFTAPLG

SEQ ID NO: 1192 - protein, 98 aa, Viola baoshanensis
  REGION 1..98: note = Antimicrobial; Cyclotide; --NA--
MDSKIVFVALVLIATFALPTLATFEKDFITTEAVRAILKKTNANVMPSEDVINALTGKTVISNVVLEETLVMKLDNGLTGIPCGESCVYLPCFTAPLG

SEQ ID NO: 1193 - protein, 98 aa, Silene latifolia
  REGION 1..98: note = Antimicrobial; Thaumatin; --NA--
MDSTLILLLSLLLFSLFTLFPGQVMGAKMVFSNKCGFPVWPGVQPSAGQPVLARGGFMLLPNQAYSMELPNRWSGRVWGRHGCFFDAAGRGHCATGDC

SEQ ID NO: 1194 - protein, 98 aa, Quercus suber
  REGION 1..98: note = Antimicrobial; Thaumatin; --NA--
MEAMLRSFIALMLSTLMLSHIPAEVSATTITLYNKCTHPVWPGIQPGAGKPILARGGFKLQPNKAYSLHLPALWSGRLWGRHGCTFDASGRGLCATGD

SEQ ID NO: 1195 - protein, 98 aa, Pinus monticola
  REGION 1..98: note = Antimicrobial; Thaumatin; --NA--
MEARTLSVSISVAVTLALIFNVYLPGVTGATFAIQNQCSYTVWAAGIPGGGKALGQGESWSVDVPAGTSAGRFWGRTSCSFDASGQGKCSTGDCGGLL

SEQ ID NO: 1196 - protein, 98 aa, Arabidopsis thaliana
  REGION 1..98: note = Antimicrobial; Thionin; --NA--
MEGKTLIVSVLIMSLFMAQNQVDANICCPSIQARTFYNACLFAVGSPSSCIRNSSCLDISESTCPRGYTNDILENTGDAVTEYCKLGCVSSVCGALTI

SEQ ID NO: 1197 - protein, 98 aa, Arabidopsis thaliana
  REGION 1..98: note = Antimicrobial; Thionin; --NA--
MEGKTVIFSVLVMGLVISQIQVEAQKTCCPSQSTRKEFEDCISEGNLQILCSAESGCRDTYVGYCPSGFPYGSLTNSGDVVNVYCKLGCVSSLCGALT

SEQ ID NO: 1198 - protein, 98 aa, Brassica napus
  REGION 1..98: note = Antimicrobial; Thionin; --NA--
MEGKTVILGVIIMSLVMAQNQVEAKICCPRTIDRNIYNACRLTGASMTNCANLSGCKIVSGTTCPPGYTHDILQNYGDAVNEYCKLGCASSVCGALTT

SEQ ID NO: 1199 - protein, 98 aa, Brassica rapa; identical to SEQ ID NO: 1198
  REGION 1..98: note = Brassica rapa subsp. pekinensis; Antimicrobial; Thionin; --NA--

SEQ ID NO: 1200 - protein, 98 aa, Rheum australe
  REGION 1..98: note = Antimicrobial; Thionin; --NA--
MEGKTVILSMLLLSLVMAQFQAEAKVVCCPSVAARSRYNMCRMVPEKCASFAGCLLVIRKCPPGWDNFNAILEADGDGVTKYCKLGCVSSVCGVLSTL

SEQ ID NO: 1201 - protein, 98 aa, Knorringia sibirica
  REGION 1..98: note = Antimicrobial; Thionin; --NA--
MEGKTVILSVLLLSLVMAQFQVEAKSCCQTTTARNIYNSCRLAGGSRERCASLSGCKHVTGNTCSPGWEKFNAILQGDGDGVAEYCKLGCVSSVCGAM

SEQ ID NO: 1202 - protein, 98 aa, Arabidopsis thaliana
  REGION 1..98: note = Antimicrobial; Thionin; --NA--
MEGKTVISSLLIMSLVLAQIQVEAKICCPTKDDRSVYFVCMLSVSSQFYCLLKSKCKNTSQTICPPGYTNDILENSGDAVNEYCKLGCASSVCGALTT

SEQ ID NO: 1203 - protein, 98 aa, Oryza sativa
  REGION 1..98: note = Oryza sativa subsp. Indica; Antimicrobial; Thionin; --NA--
MEGVKSLIMCMLVLGLVLQQEKIQVEAKSCCPSTTARNVYNSCRFAGGSRDTCAKLSGCKIVDGNCKPPYVHHTLHPEAEESEVVDFCKLGCASSVCS

SEQ ID NO: 1204 - protein, 98 aa, Zea mays
  REGION 1..98: note = Antimicrobial; Thaumatin; --NA--
MELPRSMAVLVLVFVVLCRVGEAATFTFVNRCTDTVWPGVLSNAGSPRLEPTGFELPPGAARAVPAPAGWSGRMWARTGCSQDGGTGRLVCATGDCGS

SEQ ID NO: 1205 - protein, 98 aa, Zea mays
  REGION 1..98: note = Antimicrobial; Thaumatin; --NA--
MEMARSPAHVALCSLALLLLLTAARSATFTLTNNCGYTVWPGLLSGAGTAPLPTTGFALARGASAAVDAPAGWSGRMWARTLCATDGATGRFACATGD

SEQ ID NO: 1206 - protein, 78 aa, Steinchisma laxum
  REGION 1..78: note = Antimicrobial; Cyclotide; --NA--
MESAKRVACVVALVLLVQLMAAPATMARNVEVENTPLVGLLDIAKEVNHNQLPICGETCVLGTCYTPGCRCQYPICVR

SEQ ID NO: 1207 - protein, 98 aa, Viola baoshanensis
  REGION 1..98: note = Antimicrobial; Cyclotide; --NA--
MESNKKMQLIGFVLLAAFALPALASSFEKDVISPHAIQAVLEKRGFSKLEDDPVVSALARTKTIISNPVIEEALLNGTNLKAGNGIPCAESCVWIPCT

SEQ ID NO: 1208 - protein, 98 aa, Viola baoshanensis
  REGION 1..98: note = Antimicrobial; Cyclotide; --NA--
MESNKKMQLVGFVLLAAFALPALASSFEKDVISPRAIQAVLEKRGLSKLEDDPVLSALARTKTIISNPVIEEALLNGANLKAGNGIPCAESCVWIPCT

SEQ ID NO: 1209 - protein, 98 aa, Viola baoshanensis
  REGION 1..98: note = Antimicrobial; Cyclotide; --NA--
MESNKKMQLVGFVLLAAFALPALASSFEKDVISPRAIQAVLEKRGLSKLEDDPVLSALARTKTIISNPVIEEALLNGANLKAGNTIPCAESCVWIPCT

SEQ ID NO: 1210 - protein, 98 aa, Melicytus ramiflorus
  REGION 1..98: note = Antimicrobial; Cyclotide; --NA--
MESNKMVVGVLLIAAFALPALALFERDVITHETIEAVLKKSTPNSNTMLQEDAINALTGKTLISQTILEETLLKNGVVGGSIPCGESCVYIPCISSLL

SEQ ID NO: 1211 - protein, 78 aa, Steinchisma laxum
  REGION 1..78: note = Antimicrobial; Cyclotide; --NA--
MESSKRIASVVAIILLVQLMAAPTTMARNVEGETTQIVGLSDIAREVRNNQLPICGETCVLGTCYTPGCSCAYPICVR

SEQ ID NO: 1212 - protein, 89 aa, Steinchisma laxum
  REGION 1..89: note = Antimicrobial; Cyclotide; --NA--
MESSKRVAGVVAIVLLLQLMAAPNAMARKLEGVTTPIFGLYDIARELSLAKAQGNAKEVGSNQAFCGETCLLGTCYTPGCRCTAGICLK

SEQ ID NO: 1213 - protein, 79 aa, Steinchisma laxum
  REGION 1..79: note = Antimicrobial; Cyclotide; --NA--
METGKRVAGMVAVVLLLQLMAAPITMARNVAVDENTPLVGLLDIAMEVNHNQLPICGETCVLGRCYTPNCRCQYPICVR

SEQ ID NO: 1214 - protein, 98 aa, Vitis riparia
  REGION 1..98: note = Antimicrobial; Thaumatin; --NA--
MFSSKLPSMSDLRILFIFFLCFISSIHAATFQITNQCSYTVWAAASPGGGRRLDRGQSWTLNVPAGTKMARIWGRTNCHFDASGRGRCDTGDCGGVLN

SEQ ID NO: 1215 - protein, 98 aa, Zea mays
  REGION 1..98: note = Antimicrobial; Thaumatin; --NA--
MGAIRVASLLLLAGVIWLSRAMFGAEAAGTTVFTLHNNCTHTVWPATLSGNSAAAVGGGGFELSPGATVSFPAPAGWSGRLWARTGCVASSSSPAGRL

SEQ ID NO: 1216 - protein, 98 aa, Salvia miltiorrhiza
  REGION 1..98: note = Antimicrobial; Thionin; --NA--
MGALLVSLVLGQIQVEAKKSCCPSTTARNIYNTCRLRLPASSCADLSGCKVIDGGTCPTGWTNDILENTVDEFCKLGCASSVCAAITTLQNSDASEVV

SEQ ID NO: 1217 - protein, 98 aa, Pinus monticola
  REGION 1..98: note = Antimicrobial; Thaumatin; --NA--
MGATTIYHVTAIVALIFNVLYLQGAMGATFEIRNQCSYTVWVAGIPVGGGFALGQGQSWSVDVPAGTSAGRFWGRTGCSFDASGKGSCSTGDCGGVLS

SEQ ID NO: 1218 - protein, 98 aa, Pinus monticola
  REGION 1..98: note = Antimicrobial; Thaumatin; --NA--
MGATTIYVTAIVALIFNVLYLQGATGATFVIQNHCSYTVWAAGIPVGGGQALGQGQSWSVGVPAGTSSGRFWGRTECSFDGSGNGRCSTGDCGGVLSC

SEQ ID NO: 1219 - protein, 98 aa, Pseudotsuga menziesii
  REGION 1..98: note = Antimicrobial; Thaumatin; --NA--
MGERTIAVSFPVAATLALVLMVYLQGVGGATFTIQNQCSFTVWAAGIPVGGGQALAQGQTWTVEVPAGTSAGRFWGRTGCSFDASGQGSCTTGNCGGV

SEQ ID NO: 1220 - protein, 98 aa, Sambucus nigra
  REGION 1..98: note = Antimicrobial; Thaumatin; --NA--
MGFLKSLPISIFFVIALISSSAYAANFNIRNNCPFTVWAAAVPGGGRQLNRGQVWSLDVPAGTRGARIWARTNCNFDGAGRGRCQTGDCNGLLSCQAY

SEQ ID NO: 1221 - protein, 98 aa, Sambucus nigra
  REGION 1..98: note = Antimicrobial; Thaumatin; --NA--
MGFLKSLPISIFFVISLIFSSAHAANFNIRNNCPFTVWAAAVPGGGRQLNRGQVWSLDVPARTAGARIWARTNCNFDGAGRGRCQTGDCNGLLACQAY

SEQ ID NO: 1222 - protein, 98 aa, Capsicum annuum
  REGION 1..98: note = Antimicrobial; Thaumatin; --NA--
MGHLTTCLVFFLLAFVTYTYASGVFEVHNNCPYTVWAAATPVGGGKLLERGQSWWFWAPPGTKMARIWGRTNCNFDGAGRGWCQTGDCGGVLECKGWG

SEQ ID NO: 1223 - protein, 98 aa, Vitis vinifera
  REGION 1..98: note = Antimicrobial; Thaumatin; --NA--
MGLCKILSISSFLLTALFFTPSYAATFNIQNHCSYAVWAAAVPGGGMQLGSGQSWSLNVNAGTTGGRVWARTNCNFDASGNGKCETGDCGGLLQCTAY

SEQ ID NO: 1224 - protein, 98 aa, Trifolium pratense
  REGION 1..98: note = Antimicrobial; Thaumatin; --NA--
MGLFLCNKHYPQPFLCFLIFLIFKVVSVSGATFTFTNKCDYTVWPGIYGKPELGTTGFELTKATTRTFQAPTGWSGRFWGRTGCQFDSTGHGTCSTAD

SEQ ID NO: 1225 - protein, 98 aa, Pinus monticola
  REGION 1..98: note = Antimicrobial; Thaumatin; --NA--
MGLILRSRALALLLILFSGGAIMVICAKTSPLTITIMNSCPTTIWPGLQASEGHDVLEQGGFALESLKSRSFSVANPWNGVVWARTGCSFSGEKGSCL

SEQ ID NO: 1226 - protein, 98 aa, Ficus pumila
  REGION 1..98: note = Ficus pumila var. awkeotsang; Antimicrobial; Thaumatin; --NA--
MGLLKNLGIVLCFLCLTAQFFASSHAAIFDVINNCPYTVWAASTPVGGGRQLNSRETWTINVPAGTSAARIWARTGCSFDGAGRGRCQTGDCGGVLQC

SEQ ID NO: 1227 - protein, 98 aa, Bupleurum kaoi
  REGION 1..98: note = Antimicrobial; Thaumatin; --NA--
MGMQSLVALAFAALLLVGGESARFTITNNCDKTIWPAALSGGGSQPSTTGFELASKATNSIDIPAPWTGRIWARTFCGATCLTGECGKGGGPCNGAGG

SEQ ID NO: 1228 - protein, 98 aa, Nicotiana tabacum
  REGION 1..98: note = Antimicrobial; Thaumatin; --NA--
MGNLRSSFVFFLLALVTYTYAATIEVRNNCPYTVWAASTPIGGGRRLDRGQTWVINAPRGTKMARVWGRTNCNFNAAGRGTCQTGDCGGVLQCTGWGK

SEQ ID NO: 1229 - protein, 98 aa, Pinus monticola
  REGION 1..98: note = Antimicrobial; Thaumatin; --NA--
MGPTTIYVTAIVALIFNVFYLQGAMGATFAIQNQCSYTVWAAGIPVGGGQALGQGQSWSVDVPAGTSSGRFWGRTGCSFDASGKGSCSTGDCGGVLSC

SEQ ID NO: 1230 - protein, 98 aa, Pinus monticola
  REGION 1..98: note = Antimicrobial; Thaumatin; --NA--
MGPTTIYVTAIVALIFNVLYLQGVMGATFAIQNQCSYTVWAAGIPVGGGQALGQGQSWSVDVPAGTSSGRFWGRTGCSFDASGKGSCSTGDCGGVLSC

SEQ ID NO: 1231 - protein, 98 aa, Arabidopsis thaliana
  REGION 1..98: note = Antimicrobial; Thaumatin; --NA--
MGQSQVSLFLLLILVFIYGVSSTTFTIVNQCSYTVWPGLLSGAGTSPLPTTGFSLNPTETRVIPIPAAWSGRIWGRTLCTQDATTGRFTCITGDCGSS

SEQ ID NO: 1232 - protein, 98 aa, Pinus taeda
  REGION 1..98: note = Antimicrobial; Thaumatin; --NA--
MGRRTCAASLWITAILTLLAVNVYVQGIEGATMTVKNQCSYTVWAAGSPGGGKQLGQGETWSFDVPAGTTGGRIWGRTGCSFDAGSGTGSCTTGDCGG

SEQ ID NO: 1233 - protein, 98 aa, Arabidopsis thaliana
  REGION 1..98: note = Antimicrobial; Thaumatin; --NA--
MGRSPMVPMAVLVYVSLLFSVSYSSTFVITNNCPFTIWPGTLAGSGTQPLPTTGFRLDVGQSVRIPTALGWSGRIWARTGCNFDANGAGKCMTGDCGG

SEQ ID NO: 1234 - protein, 98 aa, Avena sativa
  REGION 1..98: note = Antimicrobial; Thionin; --NA--
MGSIKGLKSVVICVLVLGIVLEHVQVEGKSCCKDTTARNCYNVCRIPGTPRPVCATTCRCKIISGNKCPKDYPKLHGDLDAGTPNAIEFCNMGCMSSV

SEQ ID NO: 1235 - protein, 98 aa, Avena sativa
  REGION 1..98: note = Antimicrobial; Thionin; --NA--
MGSIKGLKSVVICVLVLGIVLEQVQVEGKSCCKDIMARNCYNVCRIPGTPRPVCATTCRCKIISGNKCPKDYPKLHGDPDAGTPNAIEFCNTGCMSSI

SEQ ID NO: 1236 - protein, 98 aa, Avena sativa
  REGION 1..98: note = Antimicrobial; Thionin; --NA--
MGSIKGLRSLIMCVLIVGIVLEQVQVEGNTCCKDDIARNCYNVCRIPGTPTFICANMCRCIITRRNECPNDYPKLQSDLDAGTPNAIEFCNMGCMSSI

SEQ ID NO: 1237 - protein, 98 aa, Hordeum vulgare
  REGION 1..98: note = Antimicrobial; Thionin; --NA--
MGSKGLKGVMVCLLILGLVLEHVQVEGKSCCRSTLGRNCYNLCRVRGAQKLCANACRCKLTSGLKCPSSFPKLALVSNSDEPDTIDYCNLGCRASMCD

SEQ ID NO: 1238 - protein, 98 aa, Triticum aestivum
  REGION 1..98: note = Antimicrobial; Thionin; --NA--
MGSKGLKGVMVCLLILGLVLEQVQVEGKSCCRTTLGRNCYNLCRSRGAQKLCSTVCRCKLTSGLSCPKGFPKLALESNSDEPDTIEYCNLGCRSSVCD

SEQ ID NO: 1239 - protein, 98 aa, Zea mays
  REGION 1..98: note = Antimicrobial; Thaumatin; --NA--
MGTARVRFVVLVLISTFLRVREGRAATFTFVNRCTGTVWPGIQSNAGSSRLDTTGFVLPPGTSRAVPAPSGWSGRVWARTGCGQDGSGKVVCATGDCG

SEQ ID NO: 1240 - protein, 98 aa, Clitoria ternatea
  REGION 1..98: note = Antimicrobial; Cyclotide; --NA--
MGTIARYYAHVVLFLVATSVIFTVKKTEAGVPCAESCVWIPCTVTALLGCSCKDKVCYLNHVIAFEAKTMDEHHLLCQSHEDCYKKGSGNFCAPFFNH

SEQ ID NO: 1241 - protein, 98 aa, Solanum phureja
  REGION 1..98: note = Antimicrobial; Thaumatin; --NA--
MGYLRSSFIFSLASFVTYTYAATIEVRNNCPYTVWAASXPIGGGRRLNKGQTWVINAPRGTKMARIWGRTGCNFNAAGRGSCQTGDCRGVLQCTGWGK

SEQ ID NO: 1242 - protein, 98 aa, Solanum commersonii
  REGION 1..98: note = Antimicrobial; Thaumatin; --NA--
MGYLRSSFIFSLLAFVTYTYAATIEVRNNCPYTVWAASTPIGGGRRLNKGQTWVINAPRGTKMARIWGRTGCNFNAAGRGSCQTGDCGGVLQCTGWGK

SEQ ID NO: 1243 - protein, 98 aa, Solanum nigrum
  REGION 1..98: note = Antimicrobial; Thaumatin; --NA--
MGYLRSSFVFFLLAFVTYTYAATIEVRNNCPYTVWAASTPIGGGRRLDRGQTWVINAPRGTSMARIWGRTNCNFDGAGRGSCQTGDCGGVLQCTGWGK

SEQ ID NO: 1244 - protein, 98 aa, Capsicum annuum
  REGION 1..98: note = Antimicrobial; Thaumatin; --NA--
MGYLRSSFVLFLLAFVTYTYAATFEVRNNCPYTVWAASTPVGGGRRLDRGQTWTINAPPGTAMARIWGRTNCNFDGSGRGSCQTGDCGGVLQCTGWGK

SEQ ID NO: 1245 - protein, 98 aa, Actinidia chinensis
  REGION 1..98: note = Antimicrobial; Thaumatin; --NA--
MGYLTMAFGLPVFLLLTLFSSAHAATFEIRNNCPYTVWAAASPGGGRRLNSKQQWNLNVAAGTKMARIWGRTKCNFDGSGRGHCETGDCGGVLECKGW

SEQ ID NO: 1246 - protein, 98 aa, Solanum lycopersicum
  REGION 1..98: note = Antimicrobial; Thaumatin; --NA--
MGYLTSSFIFFFLALVTYTYAATIEVRNNCPYTVWAASTPIGGGRRLDRGQTWVINAPRGTKMARIWGRTNCNFNGAGRGSCQTGDCGGVLHCTGWGK

SEQ ID NO: 1247 - protein, 98 aa, Arabidopsis thaliana
  REGION 1..98: note = Antimicrobial; Thaumatin; --NA--
MIITVLHSHVSFYFIILSFLFFHAKALHLVGSDGATITIVNRCSFTVWPGILSNSGSGDIGTTGFELVPGGSRSFQAPASWSGRFWARTGCNFNSDTG

SEQ ID NO: 1248 - protein, 98 aa, Arabidopsis thaliana
  REGION 1..98: note = Antimicrobial; Thaumatin; --NA--
MIITVLHSHVSFYFIILSFLFFHGSDGATITIVNRCSFTVWPGILSNSGSGDIGTTGFELVPGGSRSFQAPASWSGRFWARTGCNFNSDTGQGTCLTG

SEQ ID NO: 1249 - protein, 98 aa, Ficus pumila
  REGION 1..98: note = Ficus pumila var. awkeotsang; Antimicrobial; Thaumatin; --NA--
MILTLVNNCPYPVWPAIQPNAGHPVLERGGFFLYSLTHRSFPAPTQHWSGRIWGRTGCISAYNRFSCATGDCGGQLECNGAGGKTPATLVQLSLHHGH

SEQ ID NO: 1250 - protein, 98 aa, Chenopodium quinoa
  REGION 1..98: note = Antimicrobial; Thaumatin; --NA--
MITSSLKSLLISCILIVGISAPIHATTFTVVNNCGYTVWGAATPGGAKELPSNGGSWTFDVNPNTAGGRVWGRTGCTSSGSNSLKCTTGDCGDGLFDC

SEQ ID NO: 1251 - protein, 92 aa, Jatropha curcas
  REGION 1..92: note = Antimicrobial; --NA--; --NA--
MKCPMRLFSTLLLLLLLLLATETGPMVAEARTCESLSHRFKGICVRNSNCAAICQTEGFQGGHCRGLRRRCFCTMYCNNHHSHPRDQNLKHI

SEQ ID NO: 1252 - protein, 98 aa, Pyrus pyrifolia
  REGION 1..98: note = Antimicrobial; Thaumatin; --NA--
MKFEALIGLVLVFLSEHAGVYSAKFTFTNKCPNTVWPGTLTGGGGPQLLSTGFELASGASTSLTVQAPWSGRFWGRSHCSIDSSGKFKCSTGDCGSGQ

SEQ ID NO: 1253 - protein, 98 aa, Arabidopsis thaliana
  REGION 1..98: note = Antimicrobial; Thaumatin; --NA--
MKFQSTSLLQLFIISSCIVYGKVTSHEVTFYVQNKCSFPIWPAVAPNSGHPVLASGGFYLPCGGIKRIDAPLGWSGRIWARTGCDFTSNSKQACETGD

SEQ ID NO: 1254 - protein, 98 aa, Arabidopsis thaliana
  REGION 1..98: note = Antimicrobial; Thionin; --NA--
MKGRILILSLLIMSLVMAQVQVEAKICCPSNQARNGYSVCRIRFSKGRCMQVSGCQNSDTCPRGWVNAILENSADATNEHCKLGCETSVCGAMNTLQN

SEQ ID NO: 1255 - protein, 76 aa, Nicotiana tabacum
  REGION 1..76: note = Antimicrobial; --NA--; --NA--
MKHFPTTAVLLFLMLLLSANEIGPRKVEAKLCQYKSRTFFGVCVSGNTCNQKCQGEAFDGGRCHGVRRRCYCYRTC

SEQ ID NO: 1256 - protein, 98 aa, Viola odorata
  REGION 1..98: note = Antimicrobial; Cyclotide; --NA--
MKMFIVLVLSAAFALPAAFATEQDVITLQAYEELLKNGAANGMTKTVISSPVLEEALVSYSKNKLGGLPVCGETCVGGTCNTPGCSCSWPVCTRNSLE

SEQ ID NO: 1257 - protein, 98 aa, Viola baoshanensis
  REGION 1..98: note = Antimicrobial; Cyclotide; --NA--
MKMFVALVLFAAFALPAAFAAQQDVITLQAYEELLKNGAANGMTKTVISSPVLEEALVSYSKNKLGGLPICGETCTLGTCYTVGCTCSWPICTRNSLE

SEQ ID NO: 1258 - protein, 98 aa, Viola baoshanensis
  REGION 1..98: note = Antimicrobial; Cyclotide; --NA--
MKMFVALVLFAAFALPAAFAAQQDVITLQAYEELLKNGAANGMTKTVISSPVLEEALVSYSKNKLGGLPVCGETCVGGTCNTPGCACSWPVCTRNSLE

SEQ ID NO: 1259 - protein, 98 aa, Viola baoshanensis
  REGION 1..98: note = Antimicrobial; Cyclotide; --NA--
MKMFVALVLFAAFALPAAFAAQQDVITLQAYEELLKNGAANGMTKTVISSPVLEEALVSYSKNKLGGLPVCGETCVGGTCNTPGCGCSWPVCTRNSLE

SEQ ID NO: 1260 - protein, 98 aa, Viola baoshanensis
  REGION 1..98: note = Antimicrobial; Cyclotide; --NA--
MKMFVALVLFAAFALPAAFAAQQDVITLQAYEELLKNGAANGMTKTVISSPVLEEALVSYSKNKLGGLPVCGETCVGGTCNTPGCTCSWPVCTRNALE

SEQ ID NO: 1261 - protein, 98 aa, Viola baoshanensis
  REGION 1..98: note = Antimicrobial; Cyclotide; --NA--
MKMFVALVLFAAFALPAAFAAQQDVITLRAYEELLKNGAANGMTKTVISSPVLEEALVSYSKNKLGGLPVCGETCVGGTCNTPGCGCSWPVCTRNSLE

SEQ ID NO: 1262 - protein, 98 aa, Viola baoshanensis
  REGION 1..98: note = Antimicrobial; Cyclotide; --NA--
MKMFVALVLFAAFALPAAFAVQQDVIALQAYEELLKTGAANGMTKTVISSPVLEEALVSYSKNKLGGLPICGETCVGGTCNTPGCSCSWPVCTRNALV

SEQ ID NO: 1263 - protein, 98 aa, Viola baoshanensis
  REGION 1..98: note = Antimicrobial; Cyclotide; --NA--
MKMFVALVLFAAFALPAAFAVQQDVITLQAYEELLKTGAANGMTKTVISSPVLEEALVSYSKNKLGGLPVCGETCVGGTCNTPGCGCSWPVCTRNALV

SEQ ID NO: 1264 - protein, 98 aa, Fragaria chiloensis
  REGION 1..98: note = Antimicrobial; Thaumatin; --NA--
MKMNTRVLLSLTLAIFFAAGAHAATITFTNNCPYTVWPGTLTSDQQPQLPTTGFELAQGANNQVITPVPWKGRFWARTGCTTAADGKFSCATAECSSG

SEQ ID NO: 1265 - protein, 98 aa, Pyrus x bretschneideri
  REGION 1..98: note = Pyrus x bretschneideri; Antimicrobial; Thaumatin; --NA--
MKNQVASLLGLTLAILFFSGAHAAKITFTNNCPDTVWPATLTGGQKPQLPSTGFELASKASQSVDAPSPWSGRFWARTRCSTDAAGKFSCETAECGSG

SEQ ID NO: 1266 - protein, 98 aa, Triticum aestivum
  REGION 1..98: note = Antimicrobial; Thionin; --NA--
MKSCCRSTLGRNCYNLCRARGAQKLCAGVCRCKISSGLSCPKGFPKLALESNSDEPDTIEYCNLGCRSSVCDYMVNAAADDEEMKLYVENCADACVSF

SEQ ID NO: 1267 - protein, 98 aa, Brassica juncea
  REGION 1..98: note = Antimicrobial; Thaumatin; --NA--
MLPLSRSETTCPYTVWAASTPIGGGRRLDRGQTWVINAPRGTSMARIWGRTNCNFDGAGRGSCQTGDCGGVLQCTGWGKPPNTLAEYALNQFSNLDFW

SEQ ID NO: 1268 - protein, 98 aa, Melicytus ramiflorus
  REGION 1..98: note = Antimicrobial; Cyclotide; --NA--
MLVGVVLIATFATAAFAALDKDAITPGAIHALSKSMKLPTDAVNVLTKSKTLVSPTKLAEEFLNDANDGVNGIPCGESCVYLPCFTTIIGCKCQGKVC

SEQ ID NO: 1269 - protein, 98 aa, Prunus persica
  REGION 1..98: note = Antimicrobial; Thaumatin; --NA--
MMKSQAALLGLTTLAILFFSGAHAAKITFTNKCSYTVWPGTLTGDQKPQLSLTGFELATGISNSVDAPSPWSGRFFGRTRCSTDASGKFSCATADCGS

SEQ ID NO: 1270 - protein, 98 aa, Prunus persica
  REGION 1..98: note = Antimicrobial; Thaumatin; --NA--
MMKSQAALLGLTTLAILFFSGAHAAKITFTNKCSYTVWPGTLTGDQKPQLSLTGFELATGISRSVDAPSPWSGRFFGRTRCSTDASGKFTCATADCGS

SEQ ID NO: 1271 - protein, 98 aa, Malus domestica
  REGION 1..98: note = Antimicrobial; Thaumatin; --NA--
MMKSQAASLLGLTLAILFFSGAHAAKITFTNNCPNTVWPGTLTGDQKPQLSLTGFELASKASQSVDAPSPWSGRFWGRTRCSTDAAGKFTCETADCGS

SEQ ID NO: 1272 - protein, 98 aa, Malus domestica
  REGION 1..98: note = Antimicrobial; Thaumatin; --NA--
MMKSQVASLLGLTLAILFFSGAHAAKITFTNNCPNTVWPGTLTGDQKPQLSLTGFELASKASRSVDAPSPWSGRFWGRTRCSTDAAGKFTCETADCGS

SEQ ID NO: 1273 - protein, 98 aa, Prunus persica
  REGION 1..98: note = Antimicrobial; Thaumatin; --NA--
MMKTLGAVLSLSLTLLSFGGAHAATMSFKNNCPYTVWPASFGNPQLSTTGFELASQASFQLDTPVPWSGRFWARTRCSTDASGKFVCETADCDSGQLM

SEQ ID NO: 1274 - protein, 98 aa, Arabidopsis thaliana
  REGION 1..98: note = Antimicrobial; Thaumatin; --NA--
MMNLSSRRASSTLTLSFTVLLLASTGSYGSTFTFANRCGYTVWPGILSNAGSPTLSTTGFELPKGTSRSLQAPTGWSGRFWARTGCKFDSSGSGTCKT

SEQ ID NO: 1275 - protein, 98 aa, Arabidopsis thaliana; identical to SEQ ID NO: 1274
  REGION 1..98: note = Antimicrobial; Thaumatin; --NA--

SEQ ID NO: 1276 - protein, 98 aa, Arabidopsis thaliana
  REGION 1..98: note = Antimicrobial; Thaumatin; --NA--
MMNRILLFMILAFVSSLSEVEPISFKITNRCRNTIWPGLLSGANSAPLPTTGFRLSRGKSKTVAIPESWSGRLWARTLCSQDRSSGSFVCLTGDCGSG

SEQ ID NO: 1277 - protein, 98 aa, Tulipa gesneriana
  REGION 1..98: note = Antimicrobial; Thionin; --NA--
MMVVVILGLVVAQTQVEAKSCCRNTTARNCYNVCRLPGTPRPVCAATCDCKIISSGKCPPGYEKLGCASSTCSTIDVVDEALDVAKEVMKEAVERCNN

SEQ ID NO: 1278 - protein, 98 aa, Tulipa gesneriana
  REGION 1..98: note = Antimicrobial; Thionin; --NA--
MMVVVILGLVVAQTQVEAKSCCRNTTARNCYNVCRLPGTPRPVCAATCDCKIISSGKCPPGYEKLGFSDVADEALDVAEEVMKEAVERCNNACSEVCT

SEQ ID NO: 1279 - protein, 98 aa, Tulipa gesneriana
  REGION 1..98: note = Antimicrobial; Thionin; --NA--
MMVVVILGLVVAQTQVEAKSCCRTTAARNCYNVCRLGGTPQTLCARTCDCIHITTGNCPRSHPKLGSASSTSSTTNVDDEALDVVDEVLDVAKEAMKE

SEQ ID NO: 1280 - protein, 98 aa, Tulipa gesneriana
  REGION 1..98: note = Antimicrobial; Thionin; --NA--
MMVVVILGLVVAQTQVEAKSCFPSTAAKYCYNACRLPGCRPETICAARCGCKIISSGNCPPGYDYENLGSASSTSSTSNVDDEALDVVDEALDVAKEA

SEQ ID NO: 1281 - protein, 98 aa, Vincetoxicum mongolicum
  REGION 1..98: note = Antimicrobial; Thaumatin; --NA--
MNFHHFSSLLVLVLSCLFATSYAATFVVTNNCQYPVWAAGVPVGGGRRLDRGQVWRLEVPAGTKQARIWGRTNCNFDASGRGKCETGDCNGLLQCKNF

SEQ ID NO: 1282 - protein, 98 aa, Nicotiana tabacum
  REGION 1..98: note = Antimicrobial; Thaumatin; --NA--
MNFLKSFPFFAFLYFGQYFVAVTHAATFDIVNKCTYTVWAAASPGGGRRLDSGQSWSINVNPGTVQARIWGRTNCNFDGSGRGNCETGDCNGMLECQG

SEQ ID NO: 1283 - protein, 98 aa, Nicotiana tabacum
  REGION 1..98: note = Antimicrobial; Thaumatin; --NA--
MNFLKSFPFYAFLCFGQYFVAVTHAATFDIVNQCTYTVWAAASPGGGRQLNSGQSWSINVNPGTVQARIWGRTNCNFDGSGRGNCETGDCNGMLECQG

SEQ ID NO: 1284 - protein, 98 aa, Olea europaea
  REGION 1..98: note = Antimicrobial; Thaumatin; --NA--
MNFSKNLPLLVSLWAITFFAYTHAATFDIVNQCTYTVWAAASPGGGRRLDQGQSWNINVAPGTTQARIWGRTNCNFDANGRGQCETGDCNGLLECQGY

SEQ ID NO: 1285 - protein, 98 aa, Nepenthes alata
  REGION 1..98: note = Antimicrobial; Thaumatin; --NA--
MNHFTKFIIFSSLLLALFAVSIDAATFVITNNCPYTVWAAASPGGGQQLNHGQTWTINVNAGQTGGRIWARTGCSLSGSNGARCQTGDCGGLLHCQGY

SEQ ID NO: 1286 - protein, 98 aa, Beta vulgaris
  REGION 1..98: note = Antimicrobial; Thaumatin; --NA--
MNHLKFFPIFSLLLALTSLFSTPTNAAMFVVKNNCPYTVWGAAVPGGGQQMNPGATWIVYANPGQTAARIWARTGCRYNGQNGLICNTGDCGGQFHCT

SEQ ID NO: 1287 - protein, 98 aa, Zea mays
  REGION 1..98: note = Antimicrobial; Thaumatin; --NA--
MNRPRCAPGLAALAVASSFLCFLSPPGAESAGVFTIINRCKTTIWPAATPGDSFGGGGFALRPGQSAVFKAPAGGWSGRIWGRTGCSFDASGNGTCAT

SEQ ID NO: 1288 - protein, 98 aa, Atriplex canescens
  REGION 1..98: note = Antimicrobial; Thaumatin; --NA--
MNSSLMKSLLISSLLLMIASLITTPTHATTFTVKNNCGYTVWGAATPGGAKELPANGGSWTFNIPAGTASCRVWGRTGCTSNGGNNLQCTTGGCGNAL

SEQ ID NO: 1289 - protein, 98 aa, Zea mays
  REGION 1..98: note = Antimicrobial; Thaumatin; --NA--
MPCLLPCAGAVSTTFTLANSCGYTVWPGLLSSAGSAPLPTTGFALAPGESRVVDAPAAWSGRIWGRTRCAADNQASGRFACATGECGSGAVECAGGGA

SEQ ID NO: 1290 - protein, 98 aa, Zea mays
  REGION 1..98: note = Antimicrobial; Defensin; --NA--
MPSYKKLVIVGFALTLLLVSFGMDASAKLCSTTMDLLICGGAIPGAVNQACDDTCRNKGYTGGGFCNMKIQRCVCRKPCALEEQTEARAGDEAAGGAG

SEQ ID NO: 1291 - protein, 98 aa, Vitis cinerea
  REGION 1..98: note = Vitis cinerea var. helleri x Vitis riparia; Antimicrobial; Thaumatin; --NA--
MSDLRILFIFFLCFISSIHAATFQITNQCSYTVWAAASPGGGRRLDRGQSWTLNVPAGTKMARIWGRTNCHFDASGRGRCDTGDCGGVLNCQGWGSPP

SEQ ID NO: 1292 - protein, 98 aa, Panax ginseng
  REGION 1..98: note = Antimicrobial; Thaumatin; --NA--
MSFSKSLSIFLVISAPFMYTHAATFDILNNCPFTVWAAAVPGGGRQLKHGQTWTINVPAGTQLVRIWPRTDCNFDFTGRGRCATGDCNGQLQCQGFGQ

SEQ ID NO: 1293 - protein, 98 aa, Solanum tuberosum
  REGION 1..98: note = Antimicrobial; Thaumatin; --NA--
MSHLTTCLVFFLLAFVTYTNASGVFEVHNNCPYTVWAAATPIGGGRRLERGQSWWFWAPPGTKMARIWGRTNCNFDGAGRGWCQTGDCGGVLECKGWG

SEQ ID NO: 1294 - protein, 98 aa, Solanum lycopersicum
  REGION 1..98: note = Antimicrobial; Thaumatin; --NA--
MSHLTTCLVFFLLAFVTYTYASGVFEVHNNCPYTVWAAATPVGGGRRLERGQSWWFWAPPGTKMARIWGRTNCNFDGAGRGWCQTGDCGGVLECKGWG

SEQ ID NO: 1295 - protein, 98 aa, Nicotiana glauca
  REGION 1..98: note = Antimicrobial; Thaumatin; --NA--
MSHLTTCVVFFLLAFVAYTCASGVFEVHNNCPYTVWAAATPVGGGRRLERGQSWWFWAPPGTKMARIWGRTNCNFDGAGRGWCQTGDCGGVLECKGWG

SEQ ID NO: 1296 - protein, 98 aa, Nicotiana tabacum
  REGION 1..98: note = Antimicrobial; Thaumatin; --NA--
MSHLTTFLVFFLLAFVTYTYASGVFEVHNNCPYTVWAAATPVGGGRRLERGQSWWFWAPPGTKMARIWGRTNCNFDGAGRGWCQTGDCGGVLECKGWG

SEQ ID NO: 1297 - protein, 98 aa, Cicer arietinum
  REGION 1..98: note = Antimicrobial; Thaumatin; --NA--
MSLIKICLSMLAFCLISAQGARFDIVNQCSYNVWPAAIPSGGGRQLNPRETWGLDIPAGTQSARIWGRTGCNFDGSGRGSCQTGDCGGDLSCHLSGQP

SEQ ID NO: 1298 - protein, 98 aa, Piper colubrinum
  REGION 1..98: note = Antimicrobial; Thaumatin; --NA--
MSLYNIVNMALPLLYLLPLLSLISTSAHAANFLIRNNCPYTVWAAAVPGGGRRLDRGATWSLNVPAGTTGARIWPRTNCNFDGSGRGRCQTGDCGGVL

SEQ ID NO: 1299 - protein, 98 aa, Pyrus pyrifolia
  REGION 1..98: note = Antimicrobial; Thaumatin; --NA--
MSMMKNQVASLLGLTLAILFFSGAHAAKITFTNNCPYTVWPGTLTGDQKPQLSLTGFELASKASQSVDAPFPWSGRFWGRTRCSTNAAGKFTCETADC

SEQ ID NO: 1300 - protein, 98 aa, Pyrus pyrifolia; identical to SEQ ID NO: 1299
  REGION 1..98: note = Antimicrobial; Thaumatin; --NA--

SEQ ID NO: 1301 - protein, 98 aa, Hevea brasiliensis
  REGION 1..98: note = Antimicrobial; Thaumatin; --NA--
MSNFNIFLISIFLLSALFFTSSDGATFTIRNNCPYTVWAAASPGGGRRLDQGQTWELNVPAGTSMARIWGRTNCNFDGSGKGHCQTGDCGGILACQGW

SEQ ID NO: 1302 - protein, 98 aa, Nicotiana tabacum
  REGION 1..98: note = Antimicrobial; Thaumatin; --NA--
MSNLTTCLVFFLLAFVTYTYASGVFEVHNNCPYTVWAAATPVGGGKRLERGQSWWFWAPPGTKMARIWGRTNCNFDGAGRGWCQTGDCGGVLECKGWG

SEQ ID NO: 1303 - protein, 98 aa, Capsicum annuum
  REGION 1..98: note = Antimicrobial; Thaumatin; --NA--
MSPNMGYYLSSFVFFLLAFVTYTYAATIEVRNNCPYTVWAASTPIGGGRRLNRGQTWVINAPRGTKMARIWGRTGCNFNAAGRGSCQTGDCGGVLQCT

SEQ ID NO: 1304 - protein, 98 aa, Populus tomentosa
  REGION 1..98: note = Antimicrobial; Thaumatin; --NA--
MSRFSYLSLFPCFLLFAHLFTFSNAATFEIRNQCTDTVWAAAVPGGGQRLDPGRSWTITANAGTTQARIWGRTKCNFDGAGRGTCETGDCNGLLQCQA

SEQ ID NO: 1305 - protein, 98 aa, Arabidopsis thaliana
  REGION 1..98: note = Antimicrobial; Thaumatin; --NA--
MSRSFTFSNKCDYTVWPGILSNAGVSPLPTTGFVLLKGETRTINAPSSWGGRFWGRTLCSTDSDGKFSCATGDCGSGKIECSGAGAAPPATLAEFTLD

SEQ ID NO: 1306 - protein, 98 aa, Hordeum vulgare
  REGION 1..98: note = Antimicrobial; Thaumatin; --NA--
MSTSAVLFLLLAVFAAGASAATFNIKNNCGSTIWPAGIPVGGGFELGSGQTSSINVPAGTQAGRIWARTGCSFNGGSGSCQTGDCGGQLSCSLSGQPP

SEQ ID NO: 1307 - protein, 98 aa, Hordeum vulgare
  REGION 1..98: note = Antimicrobial; Thaumatin; --NA--
MSTSAVLFLLLAVFAAGASAATFNIKNNCGSTIWPAGIPVGGGFELGSGQTSSINVPAGTQAGRIWARTGCSFNGGSGSCQTGDCGGQLSCSLSGRPP

SEQ ID NO: 1308 - protein, 98 aa, Hordeum vulgare
  REGION 1..98: note = Antimicrobial; Thaumatin; --NA--
MSTSAVLFLLLAVFAAGASAATFNIKNNCGSTIWPAGIPVGGGFELGSGQTSSINVPAGTQAGRIWARTGCSFNGGSGSCQTGDCGQLSCSLSGQPPA

SEQ ID NO: 1309 - protein, 98 aa, Zea mays
  REGION 1..98: note = Antimicrobial; Thaumatin; --NA--
MTSSSVFFLLLACFATCAGAATFTVRNNCGFTVWPAGIPVGGGTQLNPGSTWTVNVQAGTSGGRIWGRTGCSFSGGRGRCATGDCGGAYSCSLSGQPP

SEQ ID NO: 1310 - protein, 98 aa, Hordeum vulgare
  REGION 1..98: note = Antimicrobial; Thionin; --NA--
MVCLLILGLVLEQVQVEGKSCCRSTLGRNCYNLCRVRGAQKLCAGVCRCKLTSSGKCPTGFPKLALVSNSDEPDTVKYCNLGCRASMCDYMVNAAADD

SEQ ID NO: 1311 - protein, 79 aa, Petunia hybrida
  REGION 1..79: note = Antimicrobial; Cyclotide; --NA--
MVRVNSLRSALYLIVLILFVQLTCFSDARVMDVDLSRAFLPLTGIGCGESCVWIPCVSAAIGCSCSNKICYRNGIIPEK

SEQ ID NO: 1312 - protein, 98 aa, Glycine max
  REGION 1..98: note = Antimicrobial; Thaumatin; --NA--
MVYLALCSLLTLALSLATTHAANFEIVNNCPYTVWAAASPGGGRRLDRGQTWNLWVNPGTAMARIWGRTGCNFDGSGRGRCQTGDCTGGLNCQGWGVP

SEQ ID NO: 1313 - protein, 98 aa, Daucus carota
  REGION 1..98: note = Antimicrobial; Thaumatin; --NA--
MYFTDLNIARFAGGEAAKFTIVDNCPNTIWPAALTGTGSQPSTTGFELASKATKPIDIPAPWSGRIWARTFCAATCLTGECGKGTGPCSGAGGAPPVT

SEQ ID NO: 1314 - protein, 98 aa, Oldenlandia affinis
  REGION 1..98: note = Antimicrobial; Cyclotide; --NA--
NCLALCLLLAAVVGAFGVELSEADKSAVVNEIAEKMALQEMLDGVDKLFLRKMKSSETTLTMFLKEMQLKGLPVCGETCVGGTCNTPGCTCSWPVCTR

SEQ ID NO: 1315 - protein, 44 aa, Taraxacum officinale
  REGION 1..44: note = Antimicrobial; --NA--; --NA--
PVSRQQCSQRIQGERFNQCRSQMQDGQLQSCCQELQNVEEQCQC

SEQ ID NO: 1316 - protein, 42 aa, Leymus arenarius
  REGION 1..42: note = Antimicrobial; --NA--; --NA--
QKCGEQGRGAKCPNCLCCGRYGFCGSTPDYCGVGCQSQCRGC

SEQ ID NO: 1317 - protein, 32 aa, Petunia hybrida
  REGION 1..32: note = Antimicrobial; Cyclotide; --NA--
QSISCAESCVWIPCATSLIGCSCVNSRCIYSK

SEQ ID NO: 1318 - protein, 80 aa, Nicotiana tabacum
  REGION 1..80: note = Antimicrobial; --NA--; --NA--
RECKTESNTFPGICITKPPCRKACISEKFTDGHCSKLLRRCLCTKPCVFDEKMIKTGAETLVEEAKTLAAALLEEEIMDN

SEQ ID NO: 1319 - protein, 26 aa, Nicotiana tabacum
  REGION 1..26: note = Antimicrobial; Thaumatin; --NA--
SGVFEVHNNXPYTVWAAATPVGGGRR

SEQ ID NO: 1320 - protein, 96 aa, Arabidopsis thaliana
  REGION 1..96: note = Antimicrobial; Defensin; --NA--
SICNDRLGLCDGCDQRCKAKHGPSCESKCDGPVGMLLCTCTYECGPTKLCNGGLGNCGESCNEQCCDRNCAQRYNGGHGYCNTLDDFSLCLCKYPC

SEQ ID NO: 1321 - protein, 35 aa, Hybanthus floribundus
  REGION 1..35: note = Antimicrobial; Cyclotide; --NA--
SISCGETCTTFNCWIPNCKCNHHDKVCYWNSLDEN

SEQ ID NO: 1322 - protein, 79 aa, Pinus sylvestris
  REGION 1..79: note = Antimicrobial; --NA--; --NA--
SYFTAWAGPGCNNHAARYSKCGCSNIGNNVHGGYEFMYQGQTAAAYNTDNCKGVAQTRFSSSVNQACSSFGWKSFFIQC

SEQ ID NO: 1323 - protein, 46 aa, Malus domestica
  REGION 1..46: note = Antimicrobial; Defensin; --NA--
TCEAASGKFKGMCFSSNNCANTCAREKFDGGKCKGFRRRCMCTKKC

SEQ ID NO: 1324 - protein, 32 aa, Malus domestica
  REGION 1..32: note = Antimicrobial; Defensin; --NA--
TCVSKSNCAAVCQTEGFPGGNCRGLRRRCFCT

SEQ ID NO: 1325 - protein, 94 aa, Melicytus ramiflorus
  REGION 1..94: note = Antimicrobial; Cyclotide; --NA--
VCYKNSLALPTLEKDVITPEALEAVLKSNGGATVNIKTIVSNTIFEEALLNNANHGLGGTIPCGESCVFIPCLTSAIGCSCKSKVCYKNSLALN

SEQ ID NO: 1326 - protein, 98 aa, Oldenlandia affinis
  REGION 1..98: note = Antimicrobial; Cyclotide; --NA--
VLGVAADKTALAEEIAEMLAGVEAFETDLDKTALLTEISDKMYLRKMLSGVDIEKADKTALAKEISDKMFLRKMLQGGAGTSETADKIFKREMENRLT

SEQ ID NO: 1327 - protein, 98 aa, Oldenlandia affinis
  REGION 1..98: note = Antimicrobial; Cyclotide; --NA--
VLGVAASGHDKTALVNEITEMLAGVETFEAKLDKAALVSEMADKVFLRKMLSGVDIEKADKKALVKEISDKMFLRKMLQGGTGTSETADKIFKSEMES

SEQ ID NO: 1328 - protein, 98 aa, Brassica juncea
  REGION 1..98: note = Antimicrobial; Thionin; --NA--
VLIMSFVMAQNQVEAKSCCPSTAARWAYYLCTNSWPLTPLCISHTGCIESETTCPPGYPYAILENSGHTVHEYCKLGCASSVCGALTTLQKSGELDAS

SEQ ID NO: 1329 - protein, 64 aa, Chassalia chartacea
  REGION 1..64: note = Antimicrobial; Cyclotide; --NA--
VLVASLVMLEAQSSDTIQVPDWGKRLLMNHDSNRVGIPCGESCVWIPCLTAIAGCSCKNKVCYT

SEQ ID NO: 1330 - protein, 92 aa, Melicytus ramiflorus
  REGION 1..92: note = Antimicrobial; Cyclotide; --NA--
YKNSLALPTLEKDVITPEALEAVLKSNGGAIVNIKTIVSNTIFEEALLNNANHGLGGTIPCGESCVFIPCLTSAIGCSCKSKVCYKNSLALN

SEQ ID NO: 1331 - protein, 30 aa, Viola philippica
  REGION 1..30: note = Antimicrobial; Cyclotide; --NA--
GIPCGESCVFIPCLTSAIDCSCKSKVCYRN

SEQ ID NO: 1332 - protein, 28 aa, Panicum laxum
  REGION 1..28: note = Antimicrobial; Cyclotide; --NA--
QLPICGETCVLGGCYTPNCRCQYPICVR

SEQ ID NO: 1333 - protein, 8 aa, Cocos nucifera
  REGION 1..8: note = Antimicrobial; --NA--; --NA--
TCSYTMEA

SEQ ID NO: 1334 - protein, 30 aa, Viola odorata
  REGION 1..30: note = Antimicrobial; Cyclotide; "Shown to possess antimicrobial activity, participates in a plant defense mechanism."
GIPCGESCVYIPCLTSAVGCSCKSKVCYRN

SEQ ID NO: 1335 - protein, 31 aa, Viola odorata
  REGION 1..31: note = Antimicrobial; Cyclotide; Shown to possess antimicrobial activity; Probably participates in a plant defense mechanism
GTLPCGESCVWIPCISAAVGCSCKSKVCYKN

SEQ ID NO: 1336 - protein, 30 aa, Viola odorata
  REGION 1..30: note = Antimicrobial; Cyclotide; "Shown to possess antimicrobial activity, participates in a plant defense mechanism."
GTPCGESCVWIPCISSAVGCSCKNKVCYKN

SEQ ID NO: 1337 - protein, 30 aa, Viola hederacea
  REGION 1..30: note = Viola hederacea, Viola tricolor; Antimicrobial; Cyclotide; Shows potent antibacterial activity; participates in a plant defense mechanism.
GIPCGESCVYIPCLTSAIGCSCKSKVCYRN

SEQ ID NO: 1338 - protein, 30 aa, Viola odorata
  REGION 1..30: note = Antimicrobial; Cyclotide; Shown to possess antimicrobial activity; Probably participates in a plant defense mechanism
SIPCGESCVWIPCTITALAGCKCKSKVCYN

SEQ ID NO: 1339 - protein, 47 aa, Solanum tuberosum
  REGION 1..47: note = Antimicrobial; Defensin; "is active against potato patogens, e.g., Clavibacter michiganensis"
RHCESLSHRFKGPCTRDSNCASVCETERFSGGNCHGFRRRCFCTKPC

SEQ ID NO: 1340 - protein, 47 aa, Petunia inflata
  REGION 1..47: note = Petunia inflata, Petunia integrifolia"; Antimicrobial; Defensin; may be involved in the defence of the pistil against pathogen infection
RTCESQSHRFHGTCVRESNCASVCQTEGFIGGNCRAFRRRCFCTRNC

SEQ ID NO: 1341 - protein, 46 aa, Phoradendron liga
  REGION 1..46: note = Antimicrobial; Thionin; --NA--
KSCCPSTTARNIYNTCRLTGTSRPTCASLSGCKIISGSTCBSGWBH

SEQ ID NO: 1342 - protein, 26 aa, Clitoria ternatea
  REGION 1..26: note = Antimicrobial; Cyclotide; Shown to possess antimicrobial activity.
CGESCVFLPCFIIPGCSCKDKVCYLN

SEQ ID NO: 1343 - protein, 29 aa, Melicytus ramiflorus
  REGION 1..29: note = Antimicrobial; Cyclotide; Shown to possess antimicrobial activity.
GIPCAESCVYIPCLTSAGCSCKSKVCYRN

SEQ ID NO: 1344 - protein, 29 aa, Melicytus ramiflorus
  REGION 1..29: note = Antimicrobial; Cyclotide; Shown to possess antimicrobial activity.
GIPCAESCVYIPCLTSIGCSCKSKVCYRN

SEQ ID NO: 1345 - protein, 31 aa, Clitoria ternatea
  REGION 1..31: note = Antimicrobial; Cyclotide; Shown to possess antimicrobial activity.
GIPCGESCVFIPCTITALLGCSCKSKVCYKN

SEQ ID NO: 1346 - protein, 31 aa, Clitoria ternatea
  REGION 1..31: note = Antimicrobial; Cyclotide; Shown to possess antimicrobial activity.
GIPCGESCVYIPCTVTALLGCSCKNKVCYRN

SEQ ID NO: 1347 - protein, 29 aa, Viola odorata
  REGION 1..29: note = Antimicrobial; Cyclotide; Shown to possess antimicrobial activity.
GLPVCGETCVGGTCNTPGCSCSWPVCIRN

SEQ ID NO: 1348 - protein, 31 aa, Melicytus ramiflorus
  REGION 1..31: note = Antimicrobial; Cyclotide; Shown to possess antimicrobial activity.
GSIPCGESCVYIPCITSIVGCSCKSKVCYKN

SEQ ID NO: 1349 - protein, 30 aa, Hybanthus parviflorus
  REGION 1..30: note = Antimicrobial; Cyclotide; --NA--
GIPCAESCVYIPCTITALLGCSCKNKVCYN

SEQ ID NO: 1350 - protein, 31 aa, Viola tricolor
  REGION 1..31: note = Antimicrobial; Cyclotide; "It serves as the starting point for future bioactivity-guided screening studies ,participates in a"
GAFTPCGETCLTGECHTEGCSCVGQTFCVKK

SEQ ID NO: 1351 - protein, 29 aa, Viola tricolor
  REGION 1..29: note = Antimicrobial; Cyclotide; It serves as the starting point for future bioactivity-guided screening studies; participates in a
GAPICGESCFTGTCYTVQCSCSWPVCTRN

SEQ ID NO: 1352 - protein, 29 aa, Viola tricolor
  REGION 1..29: note = Antimicrobial; Cyclotide; "It serves as the starting point for future bioactivity-guided screening studies, participates in a"
GAPVCGETCFTGLCYSSGCSCIYPVCNRN

SEQ ID NO: 1353 - protein, 31 aa, Viola tricolor
  REGION 1..31: note = Antimicrobial; Cyclotide; participates in a plant defense mechanism.
GDIPCGESCVYIPCITGVLGCSCSHNVCYYN

SEQ ID NO: 1354 - protein, 32 aa, Viola tricolor
  REGION 1..32: note = Antimicrobial; Cyclotide; participates in a plant defense mechanism.
GDLVPCGESCVYIPCLTTVLGCSCSENVCYRN

SEQ ID NO: 1355 - protein, 28 aa, Viola tricolor
  REGION 1..28: note = Antimicrobial; Cyclotide; participates in a plant defense mechanism.
GDTCYETCFTGFCFIGGCKCDFPVCVKN

SEQ ID NO: 1356 - protein, 30 aa, Viola tricolor
  REGION 1..30: note = Antimicrobial; Cyclotide; participates in a plant defense mechanism.
GEPVCGDSCVFFGCDDEGCTCGPWSLCYRN

SEQ ID NO: 1357 - protein, 28 aa, Viola tricolor
  REGION 1..28: note = Antimicrobial; Cyclotide; participates in a plant defense mechanism.
GFACGETCIFTSCFITGCTCNSSLCFRN

SEQ ID NO: 1358 - protein, 31 aa, Viola tricolor
  REGION 1..31: note = Antimicrobial; Cyclotide; participates in a plant defense mechanism.
GGPLDCQETCTLSDRCYTKGCTCNWPICYKN

SEQ ID NO: 1359 - protein, 33 aa, Viola tricolor
  REGION 1..33: note = Antimicrobial; Cyclotide; participates in a plant defense mechanism.
GGTIFNCGESCFQGTCYTKGCACGDWKLCYGEN

SEQ ID NO: 1360 - protein, 33 aa, Viola tricolor
  REGION 1..33: note = Antimicrobial; Cyclotide; participates in a plant defense mechanism.
GGTIFSCGESCFQGTCYTKGCACGDWKLCYGEN

SEQ ID NO: 1361 - protein, 30 aa, Viola tricolor
  REGION 1..30: note = Viola tricolor, Viola baoshanensis, Viola philippica; Antimicrobial; Cyclotide; participates in a plant defense mechanism.
GIPCGESCVWIPCISGAIGCSCKSKVCYRN

SEQ ID NO: 1362 - protein, 30 aa, Viola tricolor
  REGION 1..30: note = Viola tricolor, Viola baoshanensis; Antimicrobial; Cyclotide; participates in a plant defense mechanism.
GIPCGESCVWIPCISSAIGCSCKNKVCYRK

SEQ ID NO: 1363 - protein, 30 aa, Viola tricolor
  REGION 1..30: note = Viola tricolor, Viola ignobilis; Antimicrobial; Cyclotide; participates in a plant defense mechanism.
GIPCGESCVWIPCISSALGCSCKSKVCYRN

SEQ ID NO: 1364 - protein, 31 aa, Viola tricolor
  REGION 1..31: note = Antimicrobial; Cyclotide; participates in a plant defense mechanism.
GLIPCGESCVWIPCISSVIGCSCKSKVCYKN

SEQ ID NO: 1365 - protein, 29 aa, Viola tricolor
  REGION 1..29: note = Viola tricolor, Viola ignobilis; Antimicrobial; Cyclotide; participates in a plant defense mechanism.
GLPLCGETCVGGTCNTPGCSCSWPVCTRN

SEQ ID NO: 1366 - protein, 29 aa, Viola tricolor
  REGION 1..29: note = Antimicrobial; Cyclotide; participates in a plant defense mechanism.
GLPTCGETCTLGTCYTPGCTCSWPLCTKN

SEQ ID NO: 1367 - protein, 29 aa, Viola tricolor
  REGION 1..29: note = Antimicrobial; Cyclotide; participates in a plant defense mechanism.
GLPVCGEACVGGTCNTPGCSCSWPVCTRN

SEQ ID NO: 1368 - protein, 29 aa, Chassalia curviflora
  REGION 1..29: note = Chassalia curviflora, Viola tricolor; Antimicrobial; Cyclotide; participates in a plant defense mechanism.
GLPVCGETCVGGTCNTPGCTCSWPICTRN

SEQ ID NO: 1369 - protein, 29 aa, Viola tricolor
  REGION 1..29: note = Antimicrobial; Cyclotide; "It serves as the starting point for future bioactivity-guided screening studies, participates in a"
GPPVCGETCVGGTCNTPGCSCSWPVCTRN

SEQ ID NO: 1370 - protein, 31 aa, Viola tricolor
  REGION 1..31: note = Antimicrobial; Cyclotide; participates in a plant defense mechanism.
GSIPCGESCVWIPCISGIAGCSCSNKVCYLN

SEQ ID NO: 1371 - protein, 28 aa, Viola tricolor
  REGION 1..28: note = Antimicrobial; Cyclotide; participates in a plant defense mechanism.
GSSCGETCEVFSCFITRCACIDGLCYRN

SEQ ID NO: 1372 - protein, 30 aa, Viola tricolor
  REGION 1..30: note = Antimicrobial; Cyclotide; participates in a plant defense mechanism.
GSVFNCGETCVFGTCFTSGCSCVYRVCSKD

SEQ ID NO: 1373 - protein, 31 aa, Viola tricolor
  REGION 1..31: note = Antimicrobial; Cyclotide; participates in a plant defense mechanism.
GSWPCGESCVYIPCITSIAGCECSKNVCYKN

SEQ ID NO: 1374 - protein, 32 aa, Viola tricolor
  REGION 1..32: note = Antimicrobial; Cyclotide; participates in a plant defense mechanism.
GTIFDCGETCLLGKCYTPGCSCGSWALCYGQN

SEQ ID NO: 1375 - protein, 31 aa, Viola tricolor
  REGION 1..31: note = Viola tricolor, Viola ignobilis; Antimicrobial; Cyclotide; participates in a plant defense mechanism.
GTLPCGESCVWIPCISSVVGCSCKNKVCYKN

SEQ ID NO: 1376 - protein, 30 aa, Viola tricolor
  REGION 1..30: note = Antimicrobial; Cyclotide; participates in a plant defense mechanism.
GTPCGESCIYVPCISAVFGCWCQSKVCYKD

SEQ ID NO: 1377 - protein, 29 aa, Viola tricolor
  REGION 1..29: note = Antimicrobial; Cyclotide; participates in a plant defense mechanism.
GVAVCGETCTLGTCYTPGCSCDWPICKRN

SEQ ID NO: 1378 - protein, 29 aa, Viola tricolor
  REGION 1..29: note = Antimicrobial; Cyclotide; participates in a plant defense mechanism.
GVPICGETCFQGTCNTPGCTCKWPICERN

SEQ ID NO: 1379 - protein, 32 aa, Viola tricolor
  REGION 1..32: note = Antimicrobial; Cyclotide; participates in a plant defense mechanism.
GVPSSDCLETCFGGKCNAHRCTCSQWPLCAKN

SEQ ID NO: 1380 - protein, 29 aa, Viola tricolor
  REGION 1..29: note = Antimicrobial; Cyclotide; It serves as the starting point for future bioactivity-guided screening studies; participates in a
PTPCGETCIWISCVTAAIGCYCHESICYR

SEQ ID NO: 1381 - protein, 30 aa, Oldenlandia affinis
  REGION 1..30: note = Antimicrobial; Cyclic Peptide; Shown to possess antimicrobial activity.
GTPCGESCVYIPCISGVIGCSCTDKVCYLN

SEQ ID NO: 1382 - protein, 98 aa, Petunia hybrida
  REGION 1..98: note = Antimicrobial; Defensin; Floral defensin-like protein 2
MARSICFFAVAILALMLFYETEAGTCKAECPTWEGICINKAPCVKCCKAQPEKFTDGHCSKILRRCLCTKPCATEEATATLANEVKTMAEALVEEDMM

SEQ ID NO: 1383 - protein, 77 aa, Elaeis guineensis
  REGION 1..77: note = Antimicrobial; Defensin; Defensin AMP-1. Cysteine-rich antimicrobial protein 1
MEHSRRMLPAILLLLFLLMPSEMGTKVAEARTCESQSHKFQGTCLRESNCANVCQTEGFQGGVCRGVRRRCFCTRLC

SEQ ID NO: 1384 - protein, 34 aa, Momordica cochinchinensis
  REGION 1..34: note = Antimicrobial; --NA--; --NA--
ACIVGASCGINRPCGGGCRCIIIGPPAIGICVKS

SEQ ID NO: 1385 - protein, 49 aa, Arabidopsis thaliana
  REGION 1..49: note = Antimicrobial; Defensin; --NA--
ADIKRCVVDVKLSKPCTFQECIPLCFQRYNGNGVCTGKKNEICTCAYNC

SEQ ID NO: 1386 - protein, 46 aa, Arabidopsis thaliana
  REGION 1..46: note = Antimicrobial; Defensin; --NA--
ANCVNYFEITFPEVCEANWCAAECLKAYKNGKGTCWQKFCQCVYDC

SEQ ID NO: 1387 - protein, 36 aa, Vitis vinifera
  REGION 1..36: note = Antimicrobial; --NA--; --NA--
AQDCGCSSDQCCSQWGYCGTGDDYCGTGCQSGPCTS

SEQ ID NO: 1388 - protein, 36 aa, Vitis vinifera
  REGION 1..36: note = Antimicrobial; --NA--; --NA--
AQNCGCAAGLCCSQYGYCGTGNDFCGTGCQAGPCYS

SEQ ID NO: 1389 - protein, 36 aa, Vitis vinifera
  REGION 1..36: note = Antimicrobial; --NA--; --NA--
AQNCGCASDQCCSKYGYCGTGNDYCGNTCQSGPCYS

SEQ ID NO: 1390 - protein, 36 aa, Vitis vinifera
  REGION 1..36: note = Antimicrobial; --NA--; --NA--
AQNCGCASGLCCNKFGYCGTGNAYCGDGCQAGPCYS

SEQ ID NO: 1391 - protein, 36 aa, Vitis vinifera
  REGION 1..36: note = Antimicrobial; --NA--; --NA--
AQNCGCASGLCCSKYGYCGTGSDYCGDGCQSGPCDS

SEQ ID NO: 1392 - protein, 36 aa, Vitis vinifera
  REGION 1..36: note = Antimicrobial; --NA--; --NA--
AQNCGCDAGLCCSQYGYCGTGNDYCGTGCQAGPCYS

SEQ ID NO: 1393 - protein, 36 aa, Vitis vinifera
  REGION 1..36: note = Antimicrobial; --NA--; --NA--
AQNCGCNAGLCCSQYGYCGTGNDYCGTGCQAGPCYS

SEQ ID NO: 1394 - protein, 36 aa, Vitis vinifera
  REGION 1..36: note = Antimicrobial; --NA--; --NA--
AQNCGCSASVCCSQYGYCGTTKDYCGAGCLAGPCYS

SEQ ID NO: 1395 - protein, 36 aa, Vitis vinifera
  REGION 1..36: note = Antimicrobial; --NA--; --NA--
AQNCRCDAGLCCSQYGYCGTGNDFCGTGCQAGPCYS

SEQ ID NO: 1396 - protein, 48 aa, Arabidopsis thaliana
  REGION 1..48: note = Antimicrobial; Defensin; --NA--
ARIQESTNDILKPITCNTNADCAKFCKGPIHNCVYHTCQCVPGNPHCC

SEQ ID NO: 1397 - protein, 30 aa, Viola hederacea
  REGION 1..30: note = Antimicrobial; Cyclotide; participates in a plant defense mechanism.
CAESCVWIPCTVTALLGCSCSNKVCYNGIP

SEQ ID NO: 1398 - protein, 30 aa, Viola hederacea
  REGION 1..30: note = Antimicrobial; --NA--; participates in a plant defense mechanism.
CAESCVWIPCTVTALLGCSCSNNVCYNGIP

SEQ ID NO: 1399 - protein, 27 aa, Viola tricolor
  REGION 1..27: note = Antimicrobial; Cyclotide; participates in a plant defense mechanism.
CGETCWGGTCNSVGCSCGFSWPYCTKN

SEQ ID NO: 1400 - protein, 49 aa, Arabidopsis thaliana
  REGION 1..49: note = Antimicrobial; Defensin; --NA--
DCKHPVGPYTDSCFTDCVSGKYGYNYESAFCSRDETGTCKICCCELINE

SEQ ID NO: 1401 - protein, 50 aa, Arabidopsis thaliana
  REGION 1..50: note = Antimicrobial; Defensin; --NA--
DERCTIIIHPGSPCDPSDCVQYCYAEYNGVGKCIASKPGRSANCMCTYNC

SEQ ID NO: 1402 - protein, 49 aa, Arabidopsis thaliana
  REGION 1..49: note = Antimicrobial; Defensin; --NA--
DKRCSIIIDLSPCYPIECRLSCITERNGDGECVVSKVGSTPNCLCTYDC

SEQ ID NO: 1403 - protein, 47 aa, Arabidopsis thaliana
  REGION 1..47: note = Antimicrobial; Defensin; --NA--
DYKFHVCDPSFDEKDCDFECKEFGHPGGYCRPDRVQPRIRMCYCTDR

SEQ ID NO: 1404 - protein, 50 aa, Arabidopsis thaliana
  REGION 1..50: note = Antimicrobial; Defensin; --NA--
EECRLTIDKATPCHLSDCRLSCYTGYNGVGECFDDPNVPGPDNCGCRYNC

SEQ ID NO: 1405 - protein, 41 aa, Arabidopsis thaliana
  REGION 1..41: note = Antimicrobial; Defensin; --NA--
EPQCIGSCEMLADCNTACIRMGYLFGQCVGWKTPDMCCCNH

SEQ ID NO: 1406 - protein, 40 aa, Vitis vinifera
  REGION 1..40: note = Antimicrobial; --NA--; --NA--
EQCGSLAGGALCSGGLCCSQYGYCGSTPAYCSTGCQSQCT

SEQ ID NO: 1407 - protein, 50 aa, Arabidopsis thaliana
  REGION 1..50: note = Antimicrobial; Defensin; --NA--
FTIAEPYIHPCMKGFCSFKSECANKCIFMGHHKGGDCIGGLDGIYCCCLA

SEQ ID NO: 1408 - protein, 50 aa, Arabidopsis thaliana
  REGION 1..50: note = Antimicrobial; Defensin; --NA--
GATIKKCVVDVKLSKPCTFQECQPLCLQKYNGNGLCPGDDNNICACVYNC

SEQ ID NO: 1409 - protein, 33 aa, Momordica cochinchinensis
  REGION 1..33: note = Antimicrobial; --NA--; --NA--
GCDGRGCSIFRSCSGGCRCMPIGPPGAGVCVSR

SEQ ID NO: 1410 - protein, 33 aa, Momordica cochinchinensis
  REGION 1..33: note = Antimicrobial; --NA--; --NA--
GCHGKPCGLFRLCGGGCRCWPTDTPGVGICLSG

SEQ ID NO: 1411 - protein, 33 aa, Momordica cochinchinensis
  REGION 1..33: note = Antimicrobial; --NA--; --NA--
GCHGKQCGLFRLCGGGCRCWPTDTPGVGICLSG

SEQ ID NO: 1412 - protein, 29 aa, Viola tricolor
  REGION 1..29: note = Antimicrobial; Cyclotide; participates in a plant defense mechanism.
GDACGDTCVFFGCDDPGCTCGVLSICYRN

SEQ ID NO: 1413 - protein, 31 aa, Viola tricolor
  REGION 1..31: note = Antimicrobial; Cyclotide; participates in a plant defense mechanism.
GEICGRVQWCNSKSPCPAGCYCSYSGHCVKN

SEQ ID NO: 1414 - protein, 32 aa, Viola tricolor
  REGION 1..32: note = Antimicrobial; Cyclotide; participates in a plant defense mechanism.
GEVPCIETCFITECFGFYYGCTCQSGLCKKKK

SEQ ID NO: 1415 - protein, 32 aa, Viola tricolor
  REGION 1..32: note = Antimicrobial; Cyclotide; participates in a plant defense mechanism.
GFPYVSCGETCLLGECYTEGCFCGVSICYREE

SEQ ID NO: 1416 - protein, 36 aa, Solanum lycopersicum
  REGION 1..36: note = Solanum lycopersicum, Lycopersicon esculentum; Antimicrobial; --NA--; --NA--
GGGGGGRGGGRYSGGGGRGGGGGRGGRGGGGRKCCS

SEQ ID NO: 1417 - protein, 30 aa, Viola tricolor
  REGION 1..30: note = Antimicrobial; Cyclotide; participates in a plant defense mechanism.
GHYCGETCFFIPCASSLIDCECHNDYCYRN

SEQ ID NO: 1418 - protein, 33 aa, Viola tricolor
  REGION 1..33: note = Antimicrobial; Cyclotide; participates in a plant defense mechanism.
GINLFCLETCFFMPCLSEIIGCSCYRGGCYIIY

SEQ ID NO: 1419 - protein, 31 aa, Viola tricolor
  REGION 1..31: note = Antimicrobial; Cyclotide; participates in a plant defense mechanism.
GIPCAESCVWIPCTVTALVGCSCSEKVCYYN

SEQ ID NO: 1420 - protein, 30 aa, Viola odorata
  REGION 1..30: note = Antimicrobial; Cyclotide; participates in a plant defense mechanism
GIPCAESCYYIPCTVTALLGCSCSNRVCYN

SEQ ID NO: 1421 - protein, 30 aa, Viola tricolor
  REGION 1..30: note = Antimicrobial; Cyclotide; participates in a plant defense mechanism.
GIPCGETCIFGRCHTGIIGCACEKYMCCKN

SEQ ID NO: 1422 - protein, 30 aa, Viola tricolor
  REGION 1..30: note = Antimicrobial; Cyclotide; participates in a plant defense mechanism.
GIPCGETCVFSGCYSVTFGCACEKRVCYKN

SEQ ID NO: 1423 - protein, 30 aa, Viola tricolor
  REGION 1..30: note = Antimicrobial; Cyclotide; participates in a plant defense mechanism.
GKFCFETCRSSGCASGTFGCSCEGTMCRGN

SEQ ID NO: 1424 - protein, 28 aa, Viola tricolor
  REGION 1..28: note = Antimicrobial; Cyclotide; participates in a plant defense mechanism.
GKPFCGELCSRFICYHEDCTCEWPVCTK

SEQ ID NO: 1425 - protein, 34 aa, Viola tricolor
  REGION 1..34: note = Antimicrobial; Cyclotide; participates in a plant defense mechanism.
GKSGSCGESCYKTTCSSSFYGCSCNPVNSWCWQN

SEQ ID NO: 1426 - protein, 32 aa, Viola tricolor
  REGION 1..32: note = Antimicrobial; Cyclotide; participates in a plant defense mechanism.
GLIPCGESCAWFPFCFTETIGCSCQNKICYFM

SEQ ID NO: 1427 - protein, 31 aa, Viola tricolor
  REGION 1..31: note = Antimicrobial; Cyclotide; participates in a plant defense mechanism.
GLLEIPCGDFCYFETCFPTLICCVCHEEVGN

SEQ ID NO: 1428 - protein, 27 aa, Viola tricolor
  REGION 1..27: note = Antimicrobial; Cyclotide; participates in a plant defense mechanism.
GLLQIPCGDFCYFETCFPTIICCVCHD

SEQ ID NO: 1429 - protein, 30 aa, Viola tricolor
  REGION 1..30: note = Antimicrobial; Cyclotide; participates in a plant defense mechanism.
GLNCGETCWGFSCDRDDCSCGFTWPYCSKN

SEQ ID NO: 1430 - protein, 30 aa, Viola tricolor
  REGION 1..30: note = Antimicrobial; Cyclotide; participates in a plant defense mechanism.
GLNCGETCWGFTCNRADCSCGFTYPYCSKN

SEQ ID NO: 1431 - protein, 30 aa, Hybanthus parviflorus
  REGION 1..30: note = Antimicrobial; Cyclotide; participates in a plant defense mechanism
GLPCAESCVYIPCTITALLGCSCKNKVCYN

SEQ ID NO: 1432 - protein, 29 aa, Viola odorata
  REGION 1..29: note = Antimicrobial; --NA--; participates in plant defense mechanism.
GLPCGETCFTGKCVTPGCSCSYPICKKIN

SEQ ID NO: 1433 - protein, 29 aa, Viola tricolor
  REGION 1..29: note = Antimicrobial; Cyclotide; participates in a plant defense mechanism.
GLPVCGESCVGGTCNTPGCSCTWPLCTRN

SEQ ID NO: 1434 - protein, 30 aa, Viola arvensis
  REGION 1..30: note = Antimicrobial; --NA--; participates in a plant defense mechanism.
GLPVCGETCFGGTCNTPGCSCDPWPVCSRN

SEQ ID NO: 1435 - protein, 30 aa, Viola arvensis
  REGION 1..30: note = Antimicrobial; --NA--; participates in a plant defense mechanism.
GLPVCGETCFGGTCNTPGCSCEPWPVCSRN

SEQ ID NO: 1436 - protein, 29 aa, Viola tricolor
  REGION 1..29: note = Antimicrobial; Cyclotide; participates in a plant defense mechanism.
GLPVCGETCFGGTCNTPGCSCEWPVCTRN

SEQ ID NO: 1437 - protein, 31 aa, Viola tricolor
  REGION 1..31: note = Antimicrobial; Cyclotide; participates in a plant defense mechanism.
GLTPCGESCVWIPCISSVVGCACKSKVCYKD

SEQ ID NO: 1438 - protein, 29 aa, Viola tricolor
  REGION 1..29: note = Antimicrobial; Cyclotide; participates in a plant defense mechanism.
GPPCGDTCVFDPCLVSAPCKCKNRVCYRN

SEQ ID NO: 1439 - protein, 36 aa, Vitis vinifera
  REGION 1..36: note = Antimicrobial; --NA--; --NA--
GQDCGCAADLCCSRWGYCGTGDDYCGTGCQEGPCNP

SEQ ID NO: 1440 - protein, 36 aa, Vitis vinifera
  REGION 1..36: note = Antimicrobial; --NA--; --NA--
GQTCGCDASLCCSQYGYCGTGDDYCGTGCQAGPCYS

SEQ ID NO: 1441 - protein, 30 aa, Viola tricolor
  REGION 1..30: note = Antimicrobial; Cyclotide; participates in a plant defense mechanism.
GRFSCGETCFTSACHFRDIGCQCVNSQCSR

SEQ ID NO: 1442 - protein, 32 aa, Viola tricolor
  REGION 1..32: note = Antimicrobial; Cyclotide; participates in a plant defense mechanism.
GRNCGETCAFIPCISWGCSCEFRGALKYCFKN

SEQ ID NO: 1443 - protein, 27 aa, Viola tricolor
  REGION 1..27: note = Antimicrobial; Cyclotide; participates in a plant defense mechanism.
GRSCRETCIYTSCFVTGCKCDDGACIR

SEQ ID NO: 1444 - protein, 29 aa, Viola tricolor
  REGION 1..29: note = Antimicrobial; Cyclotide; participates in a plant defense mechanism.
GSCGETCKYFGCYSMIVGCKCNRNKMCYK

SEQ ID NO: 1445 - protein, 33 aa, Viola tricolor
  REGION 1..33: note = Antimicrobial; Cyclotide; participates in a plant defense mechanism.
GSDDQMPCGESCVYIPCFTRVVGCACSEKVCYK

SEQ ID NO: 1446 - protein, 33 aa, Viola tricolor
  REGION 1..33: note = Antimicrobial; Cyclotide; participates in a plant defense mechanism.
GSDDQVACGESCAMTPCFMHVVGCVCSQKVCYR

SEQ ID NO: 1447 - protein, 30 aa, Viola tricolor
  REGION 1..30: note = Antimicrobial; Cyclotide; participates in a plant defense mechanism.
GSGCYESCYFGPCTTAMIGCSCSSNWCSKN

SEQ ID NO: 1448 - protein, 32 aa, Hybanthus floribundus
  REGION 1..32: note = Antimicrobial; Cyclotide; participates in a plant defense mechanism.
GSPIQCAETCFIGKCYTEELGCTCTAFLCMFN

SEQ ID NO: 1449 - protein, 49 aa, Lycopersicon esculentum
  REGION 1..49: note = Antimicrobial; Thionin; may have antimicrobial activity
GTCKAECPTWEGICINKAPCVKCCKAQPEKFTDGHCSKILRRCLCTKEC

SEQ ID NO: 1450 - protein, 29 aa, Viola tricolor
  REGION 1..29: note = Antimicrobial; Cyclotide; participates in a plant defense mechanism.
GTFPCGESCVWIPCLSKVIGCACKSKVCY

SEQ ID NO: 1451 - protein, 32 aa, Viola tricolor
  REGION 1..32: note = Antimicrobial; Cyclotide; participates in a plant defense mechanism.
GTIFDCGESCFLGTCYTKGCSCGEWKLCYGTN

SEQ ID NO: 1452 - protein, 30 aa, Viola hederacea
  REGION 1..30: note = Antimicrobial; --NA--; participates in a plant defense mechanism
GTPCGESCYYIPCISGVIGCSCTDKVCYLN

SEQ ID NO: 1453 - protein, 28 aa, Viola tricolor
  REGION 1..28: note = Antimicrobial; Cyclotide; participates in a plant defense mechanism.
GVLCAESCTFTSCFLTGCTCERNFCFRN

SEQ ID NO: 1454 - protein, 32 aa, Viola tricolor
  REGION 1..32: note = Antimicrobial; Cyclotide; participates in a plant defense mechanism.
GVNAHCYESCYVIPCLTEIVGCACRGNVCRPK

SEQ ID NO: 1455 - protein, 29 aa, Viola tricolor
  REGION 1..29: note = Antimicrobial; Cyclotide; participates in a plant defense mechanism.
GVPCGESCNVIPCIASLSCRCKSKVCFQN

SEQ ID NO: 1456 - protein, 30 aa, Viola tricolor
  REGION 1..30: note = Antimicrobial; Cyclotide; participates in a plant defense mechanism.
GVTCRETCYSQDCYSAWAGCKCNDGACFIN

SEQ ID NO: 1457 - protein, 28 aa, Viola tricolor
  REGION 1..28: note = Antimicrobial; Cyclotide; participates in a plant defense mechanism.
GVYCGETCKYTACRTIGCSCNSNQMCYK

SEQ ID NO: 1458 - protein, 31 aa, Viola tricolor
  REGION 1..31: note = Antimicrobial; Cyclotide; participates in a plant defense mechanism.
GYSGGCGETCFHKPCASMAYGCSCKDGACST

SEQ ID NO: 1459 - protein, 30 aa, Viola tricolor
  REGION 1..30: note = Antimicrobial; Cyclotide; participates in a plant defense mechanism.
GYSGGCGETCVTVRCFTFPLCTCKNGKCTK

SEQ ID NO: 1460 - protein, 31 aa, Viola tricolor
  REGION 1..31: note = Antimicrobial; Cyclotide; participates in a plant defense mechanism.
GYTCIETCIIWDCESSIYGCSCQSGLCKMAK

SEQ ID NO: 1461 - protein, 49 aa, Arabidopsis thaliana
  REGION 1..49: note = Antimicrobial; Defensin; --NA--
HICHDYLEGDHCDPKDCNLDCRDKWKGTGTCEPPTGTPLTRTCYCTYDC

SEQ ID NO: 1462 - protein, 49 aa, Arabidopsis thaliana
  REGION 1..49: note = Antimicrobial; Defensin; --NA--
IVCNFEGHCVTSDDCINVCKSGEDPFLCVRSGPHKGMCCCLKTNGSVLE

SEQ ID NO: 1463 - protein, 40 aa, Vitis vinifera
  REGION 1..40: note = Antimicrobial; --NA--; --NA--
JCGGQAGGRVCPGGACCSKFGRCGNTADYCGSGCQSQCSS

SEQ ID NO: 1464 - protein, 40 aa, Vitis vinifera
  REGION 1..40: note = Antimicrobial; --NA--; --NA--
JCGGQAGGRVCPGGACCSKFGWCGNTADYCGSGCQSQCSS

SEQ ID NO: 1465 - protein, 40 aa, Vitis vinifera
  REGION 1..40: note = Antimicrobial; --NA--; --NA--
JCGRQAGGALCSGGLCCSQYGYCGSTSAYCSTGCQSQCPC

SEQ ID NO: 1466 - protein, 40 aa, Vitis vinifera
  REGION 1..40: note = Antimicrobial; --NA--; --NA--
JCGRQAGGALCSGGLCCSQYGYCGSTSAYCSTGCQSQCPS

SEQ ID NO: 1467 - protein, 39 aa, Vitis vinifera
  REGION 1..39: note = Antimicrobial; --NA--; --NA--
JCGRQASGKRCAGGLCCSQYGYCGSTRPYCGVGCQSQCR

SEQ ID NO: 1468 - protein, 40 aa, Vitis vinifera
  REGION 1..40: note = Antimicrobial; --NA--; --NA--
JCGSLAGGALCSGGLCCSQYGYCGSTPAYCSTGCQSQCTS

SEQ ID NO: 1469 - protein, 50 aa, Arabidopsis thaliana
  REGION 1..50: note = Antimicrobial; Defensin; --NA--
JEMCRDLLMRAKNCDDSTCATLCKQKWKGNGSCFPNVYRKSCLCTFPCKT

SEQ ID NO: 1470 - protein, 46 aa, Arabidopsis thaliana
  REGION 1..46: note = Antimicrobial; Defensin; --NA--
JESKKGILLKPKTCNTNADCAKFCKGPIQNCLYHTCACVPGNPHCC

SEQ ID NO: 1471 - protein, 50 aa, Arabidopsis thaliana
  REGION 1..50: note = Antimicrobial; Defensin; --NA--
JETCHDLIMKRDCDEATCVNMCQQKWKGSGGSCFQNFNVMSCICNFPCQV

SEQ ID NO: 1472 - protein, 50 aa, Arabidopsis thaliana
  REGION 1..50: note = Antimicrobial; Defensin; --NA--
JHICHQILLNNNCDGATCTSLCDKQLQGTGQCYKTVDKRFICLCNYLCRT

SEQ ID NO: 1473 - protein, 50 aa, Arabidopsis thaliana
  REGION 1..50: note = Antimicrobial; Defensin; --NA--
JKECIGPCDMFTDCQAACVGIRKGYNYGQCVAWKPKDDDPFTCCCYKLTP

SEQ ID NO: 1474 - protein, 46 aa, Arabidopsis thaliana
  REGION 1..46: note = Antimicrobial; Defensin; --NA--
JLKSTCRIAEAWKGAKECNAKCAALGTTRGGVCQKFLGDLYCCCWD

SEQ ID NO: 1475 - protein, 48 aa, Arabidopsis thaliana
  REGION 1..48: note = Antimicrobial; Defensin; --NA--
JMNDCDCDHDHRCGEWEDESHGNCKQHHLRVVCTCTLDCLDISSTSNA

SEQ ID NO: 1476 - protein, 48 aa, Arabidopsis thaliana
  REGION 1..48: note = Antimicrobial; Defensin; --NA--
JNPRGRKCEDPNGVDQKAKCYIYCNEQGFLGGSCQGYTNHYMCECYVG

SEQ ID NO: 1477 - protein, 50 aa, Arabidopsis thaliana
  REGION 1..50: note = Antimicrobial; Defensin; --NA--
JSPLSQSSHEFTVVSPYLSCFGIEECLFYLYFKLYDLCVILLCTWFDLSE

SEQ ID NO: 1478 - protein, 50 aa, Arabidopsis thaliana
  REGION 1..50: note = Antimicrobial; Defensin; --NA--
KRCHLTIDKATACSLSDCRLSCYSGYNGVGKCFDDPKVAGPSNCGCIYNC

SEQ ID NO: 1479 - protein, 50 aa, Arabidopsis thaliana
  REGION 1..50: note = Antimicrobial; Defensin; --NA--
KSMNPTGRRCPDPNGVEKKSMCYSSCKTQGFMGGSCQGHKGNYMCECYEG

SEQ ID NO: 1480 - protein, 49 aa, Arabidopsis thaliana
  REGION 1..49: note = Antimicrobial; Defensin; --NA--
KTCKLFRGECPVDPCEPEKCDECCKATFGKQICGKCEQESTELHCHCRR

SEQ ID NO: 1481 - protein, 48 aa, Arabidopsis thaliana
  REGION 1..48: note = Antimicrobial; Defensin; antimicrobial
LDEPNMDTISKSREYKCKIDLDCSNHIACRHCSYRNCKCDHGTCKCMP

SEQ ID NO: 1482 - protein, 47 aa, Vitis vinifera
  REGION 1..47: note = Antimicrobial; --NA--; --NA--
MIYDVNSPLFRSFLSQKGGSSDKRKTEEQKPKEQRPKASENKPVMTE

SEQ ID NO: 1483 - protein, 29 aa, Nicotiana tabacum
  REGION 1..29: note = Nicotiana tabacum v. Xanthi; Antimicrobial; --NA--; --NA--
MKWKLFKKIGIGAVLKVLTTGLPALKLTK

SEQ ID NO: 1484 - protein, 38 aa, Arabidopsis thaliana
  REGION 1..38: note = Antimicrobial; Defensin; antimicrobial
MLMACYSAGQLGCLVFCNEAEYSYGKCIGRGRCCCYDL

SEQ ID NO: 1485 - protein, 45 aa, Glycine max
  REGION 1..45: note = Antimicrobial; --NA--; --NA--
MNQRLVLAQFDKVTRTKSRWKCSLKDRVLINDKDILFNKATGEFF

SEQ ID NO: 1486 - protein, 46 aa, Arabidopsis thaliana
  REGION 1..46: note = Antimicrobial; Defensin; --NA--
MRKVDTFAPHNDGHQWRKYGEKKINNCNFPRTNDQCQLTFFKRSTA

SEQ ID NO: 1487 - protein, 48 aa, Lycopersicon esculentum
  REGION 1..48: note = Antimicrobial; Thionin; may have antimicrobial activity
QQICKAPSQTFPGLCFMDSSCRKYCIKEKFTGGHCSKLQRKCLCTKPC

SEQ ID NO: 1488 - protein, 46 aa, Arabidopsis thaliana
  REGION 1..46: note = Antimicrobial; Defensin; --NA--
RCYTNDDCKDGQPCPVPLACLFGSCICPWKSQSKLPICQIICANLD

SEQ ID NO: 1489 - protein, 47 aa, Aquilegia olympica
  REGION 1..47: note = Antimicrobial; Defensin; --NA--
RDCESQSHKFKGTCIRKSNCASVCQSEGFNGGHCRGVTRRCYCTAKC

SEQ ID NO: 1490 - protein, 47 aa, Elaeis guineensis
  REGION 1..47: note = Antimicrobial; Defensin; --NA--
RTCESQSHKFQGTCLRESNCANVCQTEGFQGGVCRGVRRRCFCTRLC

SEQ ID NO: 1491 - protein, 47 aa, Nicotiana tabacum
  REGION 1..47: note = Antimicrobial; Thionin; --NA--
RTCESQSHRFKGPCSRDSNCATVCLTEGFSGGDCRGFRRRCFCTRPC

SEQ ID NO: 1492 - protein, 47 aa, Castanea sativa
  REGION 1..47: note = Antimicrobial; Thionin; --NA--
RTCESQSHRFKGPCVRKSNCASVCQTEGFHGGQCRGFRRRCFCTKHC

SEQ ID NO: 1493 - protein, 47 aa, Lycopersicon esculentum
  REGION 1..47: note = Antimicrobial; Thionin; may have antimicrobal activity.
RTCESQSHRFKGPCVSEKNCASVCETEGFSGGDCRGFRRRCFCTRPC

SEQ ID NO: 1494 - protein, 47 aa, Capsicum annuum
  REGION 1..47: note = Antimicrobial; Defensin; --NA--
RTCESQSHRFKGVCASETNCASVCQTEGFSGGDCRGFRRRCFCTRPC

SEQ ID NO: 1495 - protein, 47 aa, Prunus persica
  REGION 1..47: note = Antimicrobial; Defensin; --NA--
RTCESQSNRFKGTCVSTSNCASVCQTEGFPGGHCRGFRRRCFCTKHC

SEQ ID NO: 1496 - protein, 47 aa, Nicotiana attenuata
  REGION 1..47: note = Antimicrobial; Defensin; --NA--
RTCESQSRRFRGLCFSKSNCGSVCHTEGFNGGHCRGFRRRCFCTRHC

SEQ ID NO: 1497 - protein, 50 aa, Picea abies
  REGION 1..50: note = Antimicrobial; Thionin; --NA--
RTCKTPSGKFKGVCASSNNCKNVCQTEGFPSGSCDFHVANRKCYCSKPCP

SEQ ID NO: 1498 - protein, 49 aa, Triticum aestivum
  REGION 1..49: note = Antimicrobial; Defensin; may have antimicrobial activity
RTCLSQSHKFKGTCLSNSNCAAVCRTENFPDCECNTHLVERKCYCKRTC

SEQ ID NO: 1499 - protein, 49 aa, Triticum aestivum
  REGION 1..49: note = Antimicrobial; Defensin; --NA--
RTCLSQSHKFKGTCLSNSNCAAVCRTENFPDGECNTHLVERKCYCKRTC

SEQ ID NO: 1500 - protein, 30 aa, Viola odorata
  REGION 1..30: note = Antimicrobial; Cyclotide; participates in a plant defense mechanism.
SIPCGESCVWIPCISTALAGCKCKSKVCYN

SEQ ID NO: 1501 - protein, 36 aa, Vitis vinifera
  REGION 1..36: note = Antimicrobial; --NA--; --NA--
SQDCGCGAGLCCSKFGYCGTGKEYCGTGCQAGPCDS

SEQ ID NO: 1502 - protein, 48 aa, Arabidopsis thaliana
  REGION 1..48: note = Antimicrobial; Defensin; --NA--
SSVIETTKNDVCSTPCTRRYGTYECWHDCLHERYNDGGCVDGRCCCKK

SEQ ID NO: 1503 - protein, 29 aa, Viola odorata
  REGION 1..29: note = Antimicrobial; Cyclotide; participates in a plant defense mechanism.
SWPVCTRNGAPICGESCFTGKCYTVQCSC

SEQ ID NO: 1504 - protein, 29 aa, Viola odorata
  REGION 1..29: note = Antimicrobial; Cyclotide; participates in a plant defense mechanism.
SWPVCYRNGLPVCGETCTLGKCYTAGCSC

SEQ ID NO: 1505 - protein, 50 aa, Arabidopsis thaliana
  REGION 1..50: note = Antimicrobial; Defensin; --NA--
TRIMDDSSDCVFKGPCQRRSDCYERCGLKPPSRAALCQPMGLQGRVCCCL

SEQ ID NO: 1506 - protein, 50 aa, Arabidopsis thaliana
  REGION 1..50: note = Antimicrobial; Defensin; --NA--
YDRCIGPCLRFYGNHQCYKNCRKAKYDGGQCDFVKKGEKLPECCCYYNKN

SEQ ID NO: 1507 - protein, 9 aa, Jatropha chevalieri
  REGION 1..9: note = Antimicrobial; --NA--; --NA--
YTIFDIFGA

SEQ ID NO: 1508 - protein, 31 aa, Viola tricolor
  REGION 1..31: note = Viola tricolor, Viola ignobilis; Antimicrobial; Cyclotide; participates in a plant defense mechanism.
GIPCGESCVWIPCISSAIGCSCKGSKVCYRN

SEQ ID NO: 1509 - protein, 29 aa, Viola tricolor
  REGION 1..29: note = Viola tricolor, Viola ignobilis; Antimicrobial; Cyclotide; participates in a plant defense mechanism.
GLPLCGETCVGGTCNTPACSCSWPVCTRN

SEQ ID NO: 1510 - protein, 31 aa, Viola tricolor
  REGION 1..31: note = Viola tricolor, Viola ignobilis; Antimicrobial; Cyclotide; participates in a plant defense mechanism.
GTIPCGESCVWIPCISSVVGCSCKSKVCYKD

SEQ ID NO: 1511 - protein, 47 aa, Arabidopsis thaliana
  REGION 1..47: note = Antimicrobial; Defensin; --NA--
RICKSRSQKFKGPCVSEDNCANVCHTEGFPDGDCDGLLRRCYCNTHC

SEQ ID NO: 1512 - protein, 47 aa, Helianthus annuus
  REGION 1..47: note = Antimicrobial; Defensin; may play a protective role in flowers by protecting the reproductive organs from potential pathoge
RTCESQSHKFKGTCLSDTNCANVCHSERFSGGKCRGFRRRCFCTTHC

SEQ ID NO: 1513 - protein, 22 aa, Glycine max
  REGION 1..22: note = Antimicrobial; --NA--; Shows antimicrobial activity which are used to combat drug resistant bacteria in human health. Can
ALWLLKLSAQYGSLRKNAMFVP

SEQ ID NO: 1514 - protein, 45 aa, Triticum aestivum
  REGION 1..45: note = Antimicrobial; --NA--; "This block the fungalysin activity, keeping the chitinase intact. Thus, WAMPs represent novel prot"
AQRCGDQARGAKCPNCLCCGKYGFCGSGDAYCGEGSCQSQCRGCR

SEQ ID NO: 1515 - protein, 45 aa, Triticum kiharae
  REGION 1..45: note = Antimicrobial; --NA--; "This block the fungalysin activity, keeping the chitinase intact. Thus, WAMPs represent novel prot"
AQRCGDQARGAKCPNCLCCGKYGFCGSGDAYCGKGSCQSQCRGCR

SEQ ID NO: 1516 - protein, 45 aa, Aegilops speltoides
  REGION 1..45: note = Aegilops speltoides; Antimicrobial; --NA--; "This block the fungalysin activity, keeping the chitinase intact. Thus, WAMPs represent novel prot"
AQRCGDQARGAKCPNCLCCGKYGFCGSGDAYCGNGSCQSQCRGCR

SEQ ID NO: 1517 - protein, 36 aa, Mirabilis jalapa
  REGION 1..36: note = Antimicrobial; --NA--; Shown to possess strong antifungal activity
CIGNGGRCNENVGPPYCCSGFCLRQPGQGYGYCKNR

SEQ ID NO: 1518 - protein, 52 aa, Heuchera sanguinea
  REGION 1..52: note = Antimicrobial; --NA--; Inhibition of in vitro protein synthesis and inhibition of  -amylases. It also show antimicrobial
DGVKLCDVPSGTWSGHCGSSSKCSQQCKDREHFAYGGACHYQFPSCFCKRQC

SEQ ID NO: 1519 - protein, 50 aa, Heuchera sanguinea
  REGION 1..50: note = Antimicrobial; Defensin; AMPs constitute a primitive mechanism of innate immunity and help as defense to protect their host
DGVKLCDVPSGTWSGHCGSSSKCSQQCKDREHFAYGGACHYQFPSVKCFC

SEQ ID NO: 1520 - protein, 18 aa, Oryza sativa
  REGION 1..18: note = Antimicrobial; Bioactive peptides; "Used in promotion of health and/or the treatment of diseases. It is also used as antimicrobial, en"
DNRMVNHFVQEFKRKHKK

SEQ ID NO: 1521 - protein, 50 aa, Dahlia merckii
  REGION 1..50: note = Antimicrobial; --NA--; Inhibition of in vitro protein synthesis and inhibition of  -amylases. It also show antimicrobial
ELCEKASKTWSGNCGNTGHCDNQCKSWEGAAHGACHVRNGKHHCFCYFNC

SEQ ID NO: 1522 - protein, 12 aa, Capsicum annuum
  REGION 1..12: note = Antimicrobial; --NA--; Used to inhibit porcine trypsin and amylase from both human saliva and from larval insect in vitro
ETLEATMEDLTR

SEQ ID NO: 1523 - protein, 12 aa, Triticum aestivum
  REGION 1..12: note = Antimicrobial; --NA--; Tryptophan-rich peptides are used in controlling persistent pathogens of relevance to food industr
FPLTCPTKWWKG

SEQ ID NO: 1524 - protein, 12 aa, Triticum aestivum
  REGION 1..12: note = Antimicrobial; --NA--; Tryptophan-rich peptides are used in controlling persistent pathogens of relevance to food industr
FPLTWPTKWWKG

SEQ ID NO: 1525 - protein, 13 aa, Triticum aestivum
  REGION 1..13: note = Antimicrobial; --NA--; Tryptophan-rich peptides are used in controlling persistent pathogens of relevance to food industr
FPVTFRFFKFFKG

SEQ ID NO: 1526 - protein, 13 aa, Triticum aestivum
  REGION 1..13: note = Antimicrobial; --NA--; Tryptophan-rich peptides are used in controlling persistent pathogens of relevance to food industr
FPVTWGWWKWWKG

SEQ ID NO: 1527 - protein, 12 aa, Triticum aestivum
  REGION 1..12: note = Antimicrobial; --NA--; Tryptophan-rich peptides are used in controlling persistent pathogens of relevance to food industr
FPVTWPTKWLKG

SEQ ID NO: 1528 - protein, 12 aa, Triticum aestivum
  REGION 1..12: note = Antimicrobial; --NA--; Tryptophan-rich peptides are used in controlling persistent pathogens of relevance to food industr
FPVTWPTKWRKG

SEQ ID NO: 1529 - protein, 12 aa, Triticum aestivum
  REGION 1..12: note = Antimicrobial; --NA--; Tryptophan-rich peptides are used in controlling persistent pathogens of relevance to food industr
FPVTWPTKWWEG

SEQ ID NO: 1530 - protein, 12 aa, Triticum aestivum
  REGION 1..12: note = Antimicrobial; --NA--; Tryptophan-rich peptides are used in controlling persistent pathogens of relevance to food industr
FPVTWPTKWWKS

SEQ ID NO: 1531 - protein, 21 aa, Glycine max
  REGION 1..21: note = Antimicrobial; --NA--; Shows antimicrobial activity which are used to combat drug resistant bacteria in human health. Can
FQCAGVALSRCTLNRNALRRP

SEQ ID NO: 1532 - protein, 20 aa, Glycine max
  REGION 1..20: note = Antimicrobial; --NA--; Shows antimicrobial activity which are used to combat drug resistant bacteria in human health. Can
FQTLFKNQYGHVRVLQRFNK

SEQ ID NO: 1533 - protein, 17 aa, Lycopersicon esculentum
  REGION 1..17: note = Antimicrobial; Defensin; Shows very low hemolytic activity and thus represent a scaffold for the design of new antimicrobia
FSGGNCRGFRRRCFCTK

SEQ ID NO: 1534 - protein, 17 aa, Lycopersicon esculentum
  REGION 1..17: note = Antimicrobial; Defensin; Shows very low hemolytic activity and thus represent a scaffold for the design of new antimicrobia
FSGGNCRGFRRRCFSTK

SEQ ID NO: 1535 - protein, 17 aa, Lycopersicon esculentum
  REGION 1..17: note = Antimicrobial; Defensin; Shows very low hemolytic activity and thus represent a scaffold for the design of new antimicrobia
FSGGNCRGFRRRSFCTK

SEQ ID NO: 1536 - protein, 20 aa, Glycine max
  REGION 1..20: note = Antimicrobial; --NA--; Shows antimicrobial activity which are used to combat drug resistant bacteria in human health. Can
GAIVTVKGGLRVTAPAMRKP

SEQ ID NO: 1537 - protein, 14 aa, Lycopersicon esculentum
  REGION 1..14: note = Antimicrobial; Defensin; Shows very low hemolytic activity and thus represent a scaffold for the design of new antimicrobia
GNCRGFRRRCFCTK

SEQ ID NO: 1538 - protein, 14 aa, Lycopersicon esculentum
  REGION 1..14: note = Antimicrobial; Defensin; Shows very low hemolytic activity and thus represent a scaffold for the design of new antimicrobia
GNCRGFRRRCFSTK

SEQ ID NO: 1539 - protein, 14 aa, Lycopersicon esculentum
  REGION 1..14: note = Antimicrobial; Defensin; Shows very low hemolytic activity and thus represent a scaffold for the design of new antimicrobia
GNCRGFRRRSFCTK

SEQ ID NO: 1540 - protein, 18 aa, Oryza sativa
  REGION 1..18: note = Oryza sativa subsp. Japonica; Antimicrobial; Bioactive peptides; "Used in promotion of health and/or the treatment of diseases. It is also used as antimicrobial, en"
HLNKRVQRELIGWLDWLK

SEQ ID NO: 1541 - protein, 13 aa, Triticum aestivum
  REGION 1..13: note = Antimicrobial; --NA--; Tryptophan-rich peptides are used in controlling persistent pathogens of relevance to food industr
ILPWKWPWWPWRR

SEQ ID NO: 1542 - protein, 21 aa, Glycine max
  REGION 1..21: note = Antimicrobial; --NA--; Shows antimicrobial activity which are used to combat drug resistant bacteria in human health. Can
KAGRISTLNSLTLPALRQFGL

SEQ ID NO: 1543 - protein, 17 aa, Oryza sativa
  REGION 1..17: note = Oryza sativa subsp. Japonica; Antimicrobial; --NA--; "Used in promotion of health and/or the treatment of diseases. It is also used as antimicrobial, en"
KEEIERLVSIRNRQGIH

SEQ ID NO: 1544 - protein, 46 aa, Aesculus hippocastanum
  REGION 1..46: note = Antimicrobial; --NA--; Inhibition of in vitro protein synthesis and inhibition of  -amylases. It also show antimicrobial
LCNERPSQTWSGNCGNTAHCDKQCQDWEKASHGACHKRECFCYFNC

SEQ ID NO: 1545 - protein, 24 aa, Capsicum annuum
  REGION 1..24: note = Antimicrobial; --NA--; Used to inhibit porcine trypsin and amylase from both human saliva and from larval insect in vitro
LRDSSNSKPASDAAPQHVTLTSNR

SEQ ID NO: 1546 - protein, 78 aa, Persea americana
  REGION 1..78: note = Persea americana var. drymifolia; Antimicrobial; Defensin; Shows antimicrobial activity of a defensin which is used in the control of pathogens.
MALVKKSPIFYLLLLCFLVIVSEIAVTRVEAATCETPSKHFNGLCIRSSNCASVCHGEHFTDGRCQGVRRRCMCLKPC

SEQ ID NO: 1547 - protein, 75 aa, Nicotiana attenuata
  REGION 1..75: note = Antimicrobial; Defensin; Shows potent antimicrobial activity
MERKTLSFTFMLFLLLVADVSVKTSEALLGRCKVKSNRFNGPCCLTDTHCSTVCRGEGYKGGDCHGFRRRCMCLC

SEQ ID NO: 1548 - protein, 14 aa, Triticum aestivum
  REGION 1..14: note = Antimicrobial; --NA--; Tryptophan-rich peptides are used in controlling persistent pathogens of relevance to food industr
MPLSWFFPRTWGKR

SEQ ID NO: 1549 - protein, 50 aa, Solanum lycopersicum
  REGION 1..50: note = Antimicrobial; Defensin; AMPs constitute a primitive mechanism of innate immunity and help as defense to protect their host
MQIFVKTLTGKTITLEVESSDTIDNVKAKIQDKEGIPPDQQRLIFAGKQL

SEQ ID NO: 1550 - protein, 75 aa, Nicotiana attenuata
  REGION 1..75: note = Antimicrobial; esculentin; Shows potent antimicrobial activity
MTQFNIPVTMSSSLSIILVILVSLRTALSGIFSKLAGKKIKNLLISGLKNVGKEVGLDVVRTGIDIAGCKIKGEC

SEQ ID NO: 1551 - protein, 12 aa, Capsicum annuum
  REGION 1..12: note = Antimicrobial; --NA--; Used to inhibit porcine trypsin and amylase from both human saliva and from larval insect in vitro
NLEDASISLNEK

SEQ ID NO: 1552 - protein, 35 aa, Arabidopsis thaliana
  REGION 1..35: note = Antimicrobial; --NA--; "This block the fungalysin activity, keeping the chitinase intact. Thus, WAMPs represent novel prot"
QNCGCAPNLCCSQFGYCGTDDAYCGVGCRSGPCRG

SEQ ID NO: 1553 - protein, 35 aa, Zea mays
  REGION 1..35: note = Antimicrobial; --NA--; "This block the fungalysin activity, keeping the chitinase intact. Thus, WAMPs represent novel prot"
QNCGCQPNFCCSKFGYCGTTDDYCGDGCQSGPCRS

SEQ ID NO: 1554 - protein, 35 aa, Zea mays
  REGION 1..35: note = Antimicrobial; --NA--; "This block the fungalysin activity, keeping the chitinase intact. Thus, WAMPs represent novel prot"
QNCGCQPNVCCSKFGYCGTTDEYCGDGCQSGPCRS

SEQ ID NO: 1555 - protein, 35 aa, Arabidopsis thaliana
  REGION 1..35: note = Antimicrobial; --NA--; "This block the fungalysin activity, keeping the chitinase intact. Thus, WAMPs represent novel prot"
QNCGCSSELCCSQFGFCGNTSDYCGVGCQQGPCFA

SEQ ID NO: 1556 - protein, 14 aa, Oryza sativa
  REGION 1..14: note = Antimicrobial; Bioactive peptides; "Used in promotion of health and/or the treatment of diseases. It is also used as antimicrobial, en"
RARFEELNMDLFRR

SEQ ID NO: 1557 - protein, 12 aa, Nicotiana benthamiana
  REGION 1..12: note = Antimicrobial; --NA--; Serves as defense compounds of higher organisms that can be used as therapeutic agents against bac
RKKRLKLLKRLL

SEQ ID NO: 1558 - protein, 20 aa, Solanum tuberosum
  REGION 1..20: note = Antimicrobial; Thionin; Shows antimicrobial activity against potato pathogens
RNCKSLSHRFHGPCTRDSNC

SEQ ID NO: 1559 - protein, 45 aa, Macadamia integrifolia
  REGION 1..45: note = Antimicrobial; Vicilin; It inhibit various plant pathogenic fungi in vitro and also exhibited antimicrobial activity in vi
RQRDPQQQYEQCQKHCQRRETEPRHMQTCQQRCERRYEKEKRKQQ

SEQ ID NO: 1560 - protein, 45 aa, Cycas revoluta
  REGION 1..45: note = Antimicrobial; Defensin; Shows high antimicrobial activity
RRTACNCIKSSASSIGLNYNKAAKLPSRCTVNVTVPISPSVNCAT

SEQ ID NO: 1561 - protein, 28 aa, Capsicum annuum
  REGION 1..28: note = Antimicrobial; --NA--; Used to inhibit porcine trypsin and amylase from both human saliva and from larval insect in vitro
SEVTSGQTSSSSETHVQTGHDSPVINFK

SEQ ID NO: 1562 - protein, 21 aa, Glycine max
  REGION 1..21: note = Antimicrobial; --NA--; Shows antimicrobial activity which are used to combat drug resistant bacteria in human health. Can
SKEQIRQLSRRAKSSSRKTSS

SEQ ID NO: 1563 - protein, 22 aa, Glycine max
  REGION 1..22: note = Antimicrobial; --NA--; Shows antimicrobial activity which are used to combat drug resistant bacteria in human health. Can
SKKQIRELSKHAKSSSRKTISS

SEQ ID NO: 1564 - protein, 19 aa, Capsicum annuum
  REGION 1..19: note = Antimicrobial; --NA--; Used to inhibit porcine trypsin and amylase from both human saliva and from larval insect in vitro
SLEDLHNESGAAAATATQR

SEQ ID NO: 1565 - protein, 17 aa, Capsicum annuum
  REGION 1..17: note = Antimicrobial; --NA--; Used to inhibit porcine trypsin and amylase from both human saliva and from larval insect in vitro
SLHHEKETAGLNEENSK

SEQ ID NO: 1566 - protein, 13 aa, Oryza sativa
  REGION 1..13: note = Antimicrobial; Bioactive peptides; "Used in promotion of health and/or the treatment of diseases. It is also used as antimicrobial, en"
SQRQATKDAGVIS

SEQ ID NO: 1567 - protein, 13 aa, Capsicum annuum
  REGION 1..13: note = Antimicrobial; --NA--; Used to inhibit porcine trypsin and amylase from both human saliva and from larval insect in vitro
STLETTLQAANER

SEQ ID NO: 1568 - protein, 21 aa, Glycine max
  REGION 1..21: note = Antimicrobial; --NA--; Shows antimicrobial activity which are used to combat drug resistant bacteria in human health. Can
SVIVEISKKQIRELSKHAKSS

SEQ ID NO: 1569 - protein, 20 aa, Glycine max
  REGION 1..20: note = Antimicrobial; --NA--; Shows antimicrobial activity which are used to combat drug resistant bacteria in human health. Can
VFKTHHNAVSSYIKDVFRVI

SEQ ID NO: 1570 - protein, 12 aa, Oryza sativa
  REGION 1..12: note = Antimicrobial; --NA--; Exhibited LPS-neutralizing and angiogenic activities with little or no hemolytic activity against
VVRRVIEPRGLL

SEQ ID NO: 1571 - protein, 46 aa, Viscum album
  REGION 1..46: note = Antimicrobial; Thionin; --NA--
KSCCPBTTGRBIYBTCRFGGGSRZVCARISGCKIISASTCPSYPBK

SEQ ID NO: 1572 - protein, 30 aa, Viola hederacea
  REGION 1..30: note = Antimicrobial; Cyclotide; --NA--
GIPCAESCVWIPCTVTALLGCSCSNKVCYN

SEQ ID NO: 1573 - protein, 12 aa, Triticum aestivum
  REGION 1..12: note = "Antimicrobial, Antibacterial"; --NA--; Tryptophan-rich peptides are used in controlling persistent pathogens of relevance to food industr
FPVTWPTKWWKG

SEQ ID NO: 1574 - protein, 13 aa, Triticum aestivum
  REGION 1..13: note = "Antimicrobial, Antibacterial"; --NA--; Tryptophan-rich peptides are used in controlling persistent pathogens of relevance to food industr
FPVTWRWWKWWKG

SEQ ID NO: 1575 - protein, 13 aa, Hordeum vulgare
  REGION 1..13: note = "Antimicrobial, Antibacterial"; --NA--; Tryptophan-rich peptides are used in controlling persistent pathogens of relevance to food industr
FPVTWRWWTWWKG

SEQ ID NO: 1576 - protein, 13 aa, Triticum aestivum
  REGION 1..13: note = "Antimicrobial, Antibacterial"; --NA--; Tryptophan-rich peptides are used in controlling persistent pathogens of relevance to food industr
FSVTWRWWKWWKG

SEQ ID NO: 1577 - protein, 10 aa, Jatropha multifida
  REGION 1..10: note = "Antimicrobial, Antibacterial"; --NA--; Shown to possess bactericidal activity by interaction with the membrane
VWTVWGTIAG

SEQ ID NO: 1578 - protein, 33 aa, Zea mays
  REGION 1..33: note = "Antimicrobial, Antibacterial, Antifungal"; Hairpin-like peptide; Target site- Lipid Bilayer
RSGRGECRRQCLRRHEGQPWETQECMRRCRRRG

SEQ ID NO: 1579 - protein, 41 aa, Vitis vinifera
  REGION 1..41: note = "Antimicrobial, Antibacterial, Antifungal"; --NA--; is a chitin-binding peptide with a defensive function against numerous chitin-containing fungal pa
EQCGGQAGGRVCPGGACCSKFGRCGNTADYCGSGCQSQCSS

SEQ ID NO: 1580 - protein, 41 aa, Vitis vinifera
  REGION 1..41: note = "Antimicrobial, Antibacterial, Antifungal"; --NA--; is a chitin-binding peptide with a defensive function against numerous chitin-containing fungal pa
EQCGGQAGGRVCPGGACCSKFGWCGNTADYCGSGCQSQCSS

SEQ ID NO: 1581 - protein, 41 aa, Vitis vinifera
  REGION 1..41: note = "Antimicrobial, Antibacterial, Antifungal"; --NA--; is a chitin-binding peptide with a defensive function against numerous chitin-containing fungal pa
EQCGRQAGGALCSGGLCCSQYGYCGSTSAYCSTGCQSQCPC

SEQ ID NO: 1582 - protein, 41 aa, Vitis vinifera
  REGION 1..41: note = "Antimicrobial, Antibacterial, Antifungal"; --NA--; --NA--
EQCGRQAGGALCSGGLCCSQYGYCGSTSAYCSTGCQSQCPS

SEQ ID NO: 1583 - protein, 41 aa, Vitis vinifera
  REGION 1..41: note = "Antimicrobial, Antibacterial, Antifungal"; --NA--; --NA--
EQCGSLAGGALCSGGLCCSQYGYCGSTPAYCSTGCQSQCTS

SEQ ID NO: 1584 - protein, 37 aa, Mirabilis jalapa
  REGION 1..37: note = "Antimicrobial, Antibacterial, Antifungal"; --NA--; possesses antifungal activity; is active against Gram-positive bacteria
JCIGNGGRCNENVGPPYCCSGFCLRQPGQGYPYCKNR

SEQ ID NO: 1585 - protein, 40 aa, Vitis vinifera
  REGION 1..40: note = "Antimicrobial, Antibacterial, Antifungal"; --NA--; --NA--
JQCGRQASGKRCAGGLCCSQYGYCGSTRPYCGVGCQSQCR

SEQ ID NO: 1586 - protein, 41 aa, Pharbitis nil
  REGION 1..41: note = "Antimicrobial, Antibacterial, Antifungal"; --NA--; is a chitin-binding peptide with a defensive function against numerous chitin-containing fungal pa
JQCGRQASGRLCGNGLCCSQWGYCGSTAAYCGAGCQSQCKS

SEQ ID NO: 1587 - protein, 40 aa, Pharbitis nil
  REGION 1..40: note = "Antimicrobial, Antibacterial, Antifungal"; --NA--; is a chitin-binding peptide with a defensive function against numerous chitin-containing fungal pa
JQCGRQASGRLCGNRLCCSQWGYCGSTASYCGAGCQSQCR

SEQ ID NO: 1588 - protein, 41 aa, Pharbitis nil
  REGION 1..41: note = "Antimicrobial, Antibacterial, Antifungal"; --NA--; is a chitin-binding peptide with a defensive function against numerous chitin-containing fungal pa
JQCGRQASGRLCGNRLCCSQWGYCGSTASYCGAGCQSQCRS

SEQ ID NO: 1589 - protein, 41 aa, Pharbitis nil
  REGION 1..41: note = "Antimicrobial, Antibacterial, Antifungal"; --NA--; is a chitin-binding peptide with a defensive function against numerous chitin-containing fungal pa
JQCGSQARGRLCGNGLCCSQWGYCGSTAAYCGAGCQSQCKS

SEQ ID NO: 1590 - protein, 47 aa, Phaseolus lunatus
  REGION 1..47: note = Phaseolus lunatus, Phaseolus limensis; "Antimicrobial, Antibacterial, Antifungal"; Defensin; possesses antibacterial abd antifungal activity.
KTCENLADTYKGPCFTTGGCDDHCKNKEHLLSGRCRDDFRCWCTRNC

SEQ ID NO: 1591 - protein, 50 aa, Vitis vinifera
  REGION 1..50: note = "Antimicrobial, Antibacterial, Antifungal"; --NA--; --NA--
KVCQRPSKTWSGFCGSSKNCDRQCKNWEGAKHGACHAKFPGVACFCYFNC

SEQ ID NO: 1592 - protein, 45 aa, Phyllostachys pubescens
  REGION 1..45: note = "Antimicrobial, Antibacterial, Antifungal"; Defensin; "inhibits growth of plant patogenic fungi (IC50=2 micro-g/ml), and different bacteria (IC50=13-20 micro-g/ml)"
KSCCRSTTARNIYNGCRVPGTARPVCAKKSGCKIQEAKKCEPPYD

SEQ ID NO: 1593 - protein, 49 aa, Oryza sativa
  REGION 1..49: note = "Antimicrobial, Antibacterial, Antifungal"; --NA--; "active against Gram-negative bacteria (Xanthomonas oryzae, MIC=3.9 micro-g/mL and Erwinia carotovora, M"
RHCLSQSHRFKGMCVSSNNCANVCRTESFPDGECKSHGLERKCFCKKVC

SEQ ID NO: 1594 - protein, 48 aa, Oryza sativa
  REGION 1..48: note = "Antimicrobial, Antibacterial, Antifungal"; --NA--; "active against Gram-negative bacteria (Xanthomonas oryzae, MIC=3.9 micro-g/mL and Erwinia carotovora, M"
RTCESQSHRFKGPCARKANCASVCNTEGFPDGYCHGVRRRCMCTKPCP

SEQ ID NO: 1595 - protein, 25 aa, Spinacia oleracea
  REGION 1..25: note = "Antimicrobial, Antibacterial, Antifungal"; Defensin; "is active against Fusarium spp., Gram-positive and Gram-negative bacterial pathogens"
GIFSSRKCKTVSKTFRGICTRNANC

SEQ ID NO: 1596 - protein, 23 aa, Spinacia oleracea
  REGION 1..23: note = "Antimicrobial, Antibacterial, Antifungal"; Defensin; "is active against Fusarium spp., Gram-positive and Gram-negative bacterial pathogens"
MFFSSKKCKTVSKTFRGPCVRNA

SEQ ID NO: 1597 - protein, 49 aa, Medicago truncatula
  REGION 1..49: note = "Antimicrobial, Antibacterial, Antifungal"; Defensin; Shows both antifungal and antibacterial activity. MtDef5 and its more potent single domain MtDef5B
KLCERRSKTWSGPCLISGNCKRQINVEHATSGACHRQGIGFACFCKKKC

SEQ ID NO: 1598 - protein, 50 aa, Medicago truncatula
  REGION 1..50: note = "Antimicrobial, Antibacterial, Antifungal"; Defensin; Shows both antifungal and antibacterial activity. MtDef5 and its more potent single domain MtDef5B
KLCQKRSTTWSGPCLNTGNCKRQCINVEHATFGACHRQGFGFACFCYKKC

SEQ ID NO: 1599 - protein, 30 aa, Amaranthus retroflexus
  REGION 1..30: note = "Antimicrobial, Antibacterial, Antifungal"; Hevein; inhibits the growth of the fungal patogens; possesses antibacterial activity against Gram-positive
AGECVQGRCPSGMCCSQFGYCGRGPKYCGR

SEQ ID NO: 1600 - protein, 20 aa, Impatiens balsamina
  REGION 1..20: note = "Antimicrobial, Antibacterial, Antifungal"; Impatiens family; plays a role in the defense of the germinating seed against microorganisms by inhibiting the growt
QYGRRCCNWGPGRRYCKRWC

SEQ ID NO: 1601 - protein, 20 aa, Impatiens balsamina
  REGION 1..20: note = "Antimicrobial, Antibacterial, Antifungal"; Impatiens family; plays a role in the defense of the germinating seed against microorganisms by inhibiting the growt
QYRHRCCAWGPGRKYCKRWC

SEQ ID NO: 1602 - protein, 46 aa, Vigna radiata
  REGION 1..46: note = Vigna radiata, Vigna nakashimae; "Antimicrobial, Antibacterial, Antifungal, Insecticidal, Alpha-amylase-inhibitor"; Defensin; is active against larvae of the bruchid Callosobruchus chinensis.; Inhibits development of seed be
RTCMIKKEGWGKCLIDTTCAHSCKNRGYIGGNCKGMTRTCYCLVNC

SEQ ID NO: 1603 - protein, 31 aa, Viola odorata
  REGION 1..31: note = "Antimicrobial, Antibacterial, Antifungal, Insecticidal, Enzymatic-degradation"; Cyclotide; Shown to possess insecticidal and enzymatic digestion activity.
DIFCGETCAFIPCITHVPGTCSCKSKVCYFN

SEQ ID NO: 1604 - protein, 29 aa, Phytolacca dioica
  REGION 1..29: note = "Antimicrobial, Antibacterial, Immunomodulatory"; Ribosome-inactivating; Shows antibacterial activity and immunomodulatory effect on human cells
ATSPTELPKYVLVDLKIGTGKNVQTFTLA

SEQ ID NO: 1605 - protein, 29 aa, Phytolacca dioica
  REGION 1..29: note = "Antimicrobial, Antibacterial, Immunomodulatory"; Ribosome-inactivating; Shows antibacterial activity and immunomodulatory effect on human cells
ATTTTELPKYVLVDLKLGSEKDAKTFTLA

SEQ ID NO: 1606 - protein, 26 aa, Phytolacca dioica
  REGION 1..26: note = "Antimicrobial, Antibacterial, Immunomodulatory"; Ribosome-inactivating; Shows antibacterial activity and immunomodulatory effect on human cells
LPDSNLTPKYVLVKLQDASSKTITLM

SEQ ID NO: 1607 - protein, 26 aa, Phytolacca dioica
  REGION 1..26: note = "Antimicrobial, Antibacterial, Immunomodulatory"; Ribosome-inactivating; Shows antibacterial activity and immunomodulatory effect on human cells
LPNNSSTIKYLLVKLQGASQKTITLM

SEQ ID NO: 1608 - protein, 30 aa, Phytolacca dioica
  REGION 1..30: note = "Antimicrobial, Antibacterial, Immunomodulatory"; Ribosome-inactivating; Shows antibacterial activity and immunomodulatory effect on human cells
LPNTNPNPKYLLVELNAKLSSGEVKSITLM

SEQ ID NO: 1609 - protein, 30 aa, Viola odorata
  REGION 1..30: note = Viola odorata, Viola tricolor, Pombalia calceolaria; "Antimicrobial, Anticancer"; Cyclotide; Shown to possess anticancer activity; participates in a plant defense mechanism.
GIPCGESCVWIPCISSAIGCSCKNKVCYRN

SEQ ID NO: 1610 - protein, 6 aa, Annona cherimola
  REGION 1..6: note = "Antimicrobial, Anticancer"; Cyclic Peptide; Target site: lipid bilayer; participates in a plant defense mechanism
PGLGFY

SEQ ID NO: 1611 - protein, 9 aa, Annona cherimola
  REGION 1..9: note = "Antimicrobial, Anticancer"; Cyclic Peptide; Target site: lipid bilayer; participates in a plant defense mechanism
PGMGIYLPM

SEQ ID NO: 1612 - protein, 30 aa, Viola tricolor
  REGION 1..30: note = "Antimicrobial, Anticancer"; Cyclotide; possesses cancer cell toxicity.
CLPVCGETCFGGTCNTPGCSCETWPVCSRN

SEQ ID NO: 1613 - protein, 5 aa, Oryza sativa
  REGION 1..5: note = "Antimicrobial, Anticancer"; --NA--; "At 600-700 micro-g/mL dose caused 84% inhibition to human colon cancer cells (Caco-2, HCT-116) growth, "
EQRPR

SEQ ID NO: 1614 - protein, 46 aa, Viscum coloratum
  REGION 1..46: note = "Antimicrobial, Anticancer"; --NA--; IC50 value of viscotoxin B2 on the rat osteoblast-like sarcoma 17/2.8 cells in vitro is 1.6 micro-g/L.
KSCCKNTTGRNIYNTCRFAGGSRERCAKLSGCKIISASTCPSYPDK

SEQ ID NO: 1615 - protein, 43 aa, Amaranthus hypochondriacus
  REGION 1..43: note = "Antimicrobial, Anticancer"; --NA--; --NA--
SKWQHQQDSCRKQLQGVNLTPCEKHIMQKIQGRGDDDDDDDDD

SEQ ID NO: 1616 - protein, 15 aa, Phaseolus limensis
  REGION 1..15: note = "Antimicrobial, Anticancer, Antifungal"; Defensin; AMPs constitute a primitive mechanism of innate immunity and help as defense to protect their host
KTCENLATYYRGPCF

SEQ ID NO: 1617 - protein, 47 aa, Nicotiana excelsior
  REGION 1..47: note = "Antimicrobial, Antifungal"; Defensin; --NA--
KDCKTESNTFPGICITKPPCRKACIKEKFTDGHCSKILRRCLCTKPC

SEQ ID NO: 1618 - protein, 63 aa, Macadamia integrifolia
  REGION 1..63: note = "Antimicrobial, Antifungal"; --NA--; --NA--
KRDPQQREYEDCRRRCEQQEPRQQHQCQLRCREQQRQHGRGGDMMNPQRGGSGRYEEGEEEQS

SEQ ID NO: 1619 - protein, 47 aa, Sorghum bicolor
  REGION 1..47: note = "Antimicrobial, Antifungal"; Defensin; --NA--
RVCMKGSAGFKGLCMRDQNCAQVCLQEGWGGGNCDGVMRQCKCIRQC

SEQ ID NO: 1620 - protein, 47 aa, Sorghum bicolor
  REGION 1..47: note = "Antimicrobial, Antifungal"; Defensin; --NA--
RVCMKGSQHHSFPCISDRLCSNECVKEEGGWTAGYCHLRYCRCQKAC

SEQ ID NO: 1621 - protein, 21 aa, Spinacia oleracea
  REGION 1..21: note = "Antimicrobial, Antifungal"; Defensin; --NA--
TCESPSHKFKGPCATNRNCES

SEQ ID NO: 1622 - protein, 50 aa, Stellaria media
  REGION 1..50: note = "Antimicrobial, Antifungal"; Defensin; Target site- Lipid Bilayer
KICERASGTWKGICIHSNDCNNQCVKWENAGSGSCHYQFPNYMCFCYFDC

SEQ ID NO: 1623 - protein, 48 aa, Nicotiana paniculata
  REGION 1..48: note = "Antimicrobial, Antifungal"; Defensin; --NA--
KSTCKAESNTFPGLCITKPPCRKACLSEKFTDGKCSKILRRCICYKPC

SEQ ID NO: 1624 - protein, 48 aa, Capsicum annuum
  REGION 1..48: note = "Antimicrobial, Antifungal"; Defensin; --NA--
KICEALSGNFKGLCLSSRDCGNVCRREGFTDGSCIGFRLQCFCTKPCA

SEQ ID NO: 1625 - protein, 47 aa, Capsicum annuum
  REGION 1..47: note = "Antimicrobial, Antifungal"; Defensin; --NA--
RTCESQSHRFKGLCFSKSNCGSVCHTEGFNGGHCRGFRRRCFCTRHC

SEQ ID NO: 1626 - protein, 19 aa, Cucurbita maxima
  REGION 1..19: note = "Antimicrobial, Antifungal"; --NA--; "inhibits mycelial growth in the fungi Botrytis cinerea, Fusarium oxysporum and Mycosphaerella oxys"
PQRGEGGRAGNLLREEQEI

SEQ ID NO: 1627 - protein, 36 aa, Cucumis melo
  REGION 1..36: note = "Antimicrobial, Antifungal"; --NA--; "possesses antifungal activity against a number of phytopathogenic fungi, including Helminthosporiu"
YKRGGGGWGGGGGWKGGGGGGGGWKGGGGGGKGGGG

SEQ ID NO: 1628 - protein, 47 aa, Nicotiana tabacum
  REGION 1..47: note = "Antimicrobial, Antifungal"; Defensin; may play a protective role in flowers by protecting the reproductive organs from potential pathoge
RECKTESNTFPGICITKPPCRKACISEKFTDGHCSKLLRRCLCTKPC

SEQ ID NO: 1629 - protein, 47 aa, Triticum kiharae
  REGION 1..47: note = "Antimicrobial, Antifungal"; Defensin; --NA--
RDCESDSHKFHGACFSDTNCANVCQTEGFTAGKCVGVQRHCHCTKDC

SEQ ID NO: 1630 - protein, 45 aa, Triticum kiharae
  REGION 1..45: note = "Antimicrobial, Antifungal"; Defensin; --NA--
RDCKSDSHKFHGACFSDTNCANVCQTEGFTRGKCDGIHCHCIKDC

SEQ ID NO: 1631 - protein, 46 aa, Triticum kiharae
  REGION 1..46: note = "Antimicrobial, Antifungal"; Defensin; --NA--
RDCRSQSKTFVGLCVSDTNCASVCLTEHFPGGKCDGYRRCFCTKDC

SEQ ID NO: 1632 - protein, 45 aa, Triticum kiharae
  REGION 1..45: note = "Antimicrobial, Antifungal"; Defensin; --NA--
RDCTSQSHKFVGLCLSDRNCASVCLTEYFTGGKCDHRRCVCTKGC

SEQ ID NO: 1633 - protein, 46 aa, Triticum kiharae
  REGION 1..46: note = "Antimicrobial, Antifungal"; Defensin; --NA--
RECRSESKKFVGLCVSDTNCASVCLTERFPGGKCDGYRRCFCTKDC

SEQ ID NO: 1634 - protein, 46 aa, Triticum kiharae
  REGION 1..46: note = "Antimicrobial, Antifungal"; Defensin; --NA--
RECRSQSKQFVGLCVSDTNCASVCLTEHFPGGKCDGYRRCFCTKDC

SEQ ID NO: 1635 - protein, 49 aa, Triticum kiharae
  REGION 1..49: note = "Antimicrobial, Antifungal"; Defensin; --NA--
RTCESQSHKFKGPCFSDSNCATVCRTENFPRGQCNQHHVERKCYCERSC

SEQ ID NO: 1636 - protein, 49 aa, Triticum monococcum
  REGION 1..49: note = "Antimicrobial, Antifungal"; Defensin; --NA--
RTCQSQSHKFKGACFSDTNCASVCRTENFPRGQCNQHHVERKCYCERDC

SEQ ID NO: 1637 - protein, 49 aa, Triticum kiharae
  REGION 1..49: note = "Antimicrobial, Antifungal"; Defensin; Target site: lipid bilayer
RTCQSQSHKFKGACFSDTNCDSVCRTENFPRGQCNQHHVERKCYCERDC

SEQ ID NO: 1638 - protein, 50 aa, Nigella sativa
  REGION 1..50: note = "Antimicrobial, Antifungal"; Defensin; Target site- Lipid Bilayer
KFCEKPSGTWSGVCGNSGACKDQCIRLEGAKHGSCNYKPPAHRCICYYEC

SEQ ID NO: 1639 - protein, 47 aa, Vitis vinifera
  REGION 1..47: note = "Antimicrobial, Antifungal"; Defensin; Target site- Lipid Bilayer; shows strong antifungal activity against a broad spectrum of plant pat
RTCESQSHRFKGTCVRQSNCAAVCQTEGFHGGNCRGFRRRCFCTKHC

SEQ ID NO: 1640 - protein, 9 aa, Cocos nucifera
  REGION 1..9: note = "Antimicrobial, Antifungal"; --NA--; Target site: lipid bilayer ; These show remarkable potential to contribute in the development of n
SVAGRAQGM

SEQ ID NO: 1641 - protein, 8 aa, Cocos nucifera
  REGION 1..8: note = "Antimicrobial, Antifungal"; --NA--; Target site: lipid bilayer
YCSYTMEA

SEQ ID NO: 1642 - protein, 50 aa, Raphanus sativus
  REGION 1..50: note = Raphanus sativus, Brassica napus, Brassica oleracea var. gemmifera, Brassica rapa"; "Antimicrobial, Antifungal"; Defensin; "Target site: lipid bilayer, possesses antifungal activity"
KLCERSSGTWSGVCGNNNACKNQCIRLEGAQHGSCNYVFPAHKCICYFPC

SEQ ID NO: 1643 - protein, 46 aa, Pisum sativum; identical to SEQ ID NO: 831
  REGION 1..46: note = "Antimicrobial, Antifungal"; Defensin; "Target site: lipid bilayer, Shows antifungal activity and sodium and potassium channel inhibiting "

SEQ ID NO: 1644 - protein, 58 aa, Helianthus annuus
  REGION 1..58: note = "Antimicrobial, Antifungal"; Defensin; May play a protective role in flowers by protecting the reproductive organs from potential pathoge
NEMGGPLVVEARTCESQSHKFKGTCLSDTNCANVCHSERFSGGKCRGFRRRCFCTTHC

SEQ ID NO: 1645 - protein, 23 aa, Arabidopsis thaliana
  REGION 1..23: note = "Antimicrobial, Antifungal"; --NA--; induces the production of plant defensin (PDF1.2) and of H(2)O(2). Promotes resistnce to the root
ATKVKAKQRGKEKVSSGRPGQHN

SEQ ID NO: 1646 - protein, 36 aa, Arabidopsis thaliana
  REGION 1..36: note = "Antimicrobial, Antifungal"; --NA--; induces the production of plant defensin (PDF1.2) and of H(2)O(2). Promotes resistnce to the root
DNKAKSKKRDKEKPSSGRPGQTNSVPNAAIQVYKED

SEQ ID NO: 1647 - protein, 23 aa, Arabidopsis thaliana
  REGION 1..23: note = "Antimicrobial, Antifungal"; --NA--; induces the production of plant defensin (PDF1.2) and of H(2)O(2). Promotes resistnce to the root
EIKARGKNKTKPTPSSGKGGKHN

SEQ ID NO: 1648 - protein, 40 aa, Vitis vinifera
  REGION 1..40: note = "Antimicrobial, Antifungal"; --NA--; is a chitin-binding peptide with a defensive function against numerous chitin-containing fungal pa
EQCGGQAGGRVCPGGACCSKFGRCGNTADYCGSGCQSQCS

SEQ ID NO: 1649 - protein, 40 aa, Euonymus europaeus
  REGION 1..40: note = "Antimicrobial, Antifungal"; Hevein; inhibits fungal growth
EQCGRQAGGALCPGGQCCSQYGWCGTTNEYCGQGCQSQCG

SEQ ID NO: 1650 - protein, 40 aa, Vitis vinifera
  REGION 1..40: note = "Antimicrobial, Antifungal"; --NA--; is a chitin-binding peptide with a defensive function against numerous chitin-containing fungal pa
EQCGRQAGGALCSGGLCCSQYGYCGSTSAYCSTGCQSQCP

SEQ ID NO: 1651 - protein, 8 aa, Jatropha chevalieri
  REGION 1..8: note = "Antimicrobial, Antifungal"; --NA--; possesses antimalarial activity (IC50 = 8.9 micro-M)..
GIPILAIM

SEQ ID NO: 1652 - protein, 27 aa, Arabidopsis thaliana
  REGION 1..27: note = "Antimicrobial, Antifungal"; --NA--; induces the production of plant defensin (PDF1.2) and of H(2)O(2). Promotes resistnce to the root
GLPGKKNVLKKSRESSGKPGGTNKKPF

SEQ ID NO: 1653 - protein, 44 aa, Sambucus nigra
  REGION 1..44: note = "Antimicrobial, Antifungal"; Hevein; inhibits fungal growth
GPWQCGRDAGGALCHDNLCCSFWGFCGSTYQYCEDGCQSQCRDT

SEQ ID NO: 1654 - protein, 41 aa, Morus sp.
  REGION 1..41: note = "Antimicrobial, Antifungal"; Hevein; inhibits fungal growth
HRCGRALGNPPCNPGRCCSIHNWCGSTAAYCRGSSCQYQCW

SEQ ID NO: 1655 - protein, 23 aa, Arabidopsis thaliana
  REGION 1..23: note = "Antimicrobial, Antifungal"; --NA--; induces the production of plant defensin (PDF1.2) and of H(2)O(2). Promotes resistnce to the root
ITAVLRRRPRPPPYSSGRPGQNN

SEQ ID NO: 1656 - protein, 45 aa, Vitis vinifera
  REGION 1..45: note = "Antimicrobial, Antifungal"; --NA--; --NA--
JQCGRQAGGRTCANNLCCSQYGYCGTTAEYCSPSQSCQSNCQSGG

SEQ ID NO: 1657 - protein, 45 aa, Euonymus europaeus
  REGION 1..45: note = "Antimicrobial, Antifungal"; Hevein; inhibits fungal growth
JQCGRQAGNRRCANNLCCSQYGYCGRTNEYCCTSQGCQSQCRRCG

SEQ ID NO: 1658 - protein, 45 aa, Euonymus europaeus
  REGION 1..45: note = "Antimicrobial, Antifungal"; Hevein; inhibits fungal growth
JQCGRQAGNRRCPNNLCCSQFGYCGRTNEYCCTGFGCQSNCRRCG

SEQ ID NO: 1659 - protein, 41 aa, Eucommia ulmoides
  REGION 1..41: note = "Antimicrobial, Antifungal"; --NA--; "inhibits phytopathogenic fungi: P. infestans, A. lycopersici, V. dahliae, G. zeae, A. nicotinae, F"
JTCASRCPRPCNAGLCCSIYGYCGSGAAYCGAGNCRCQCRG

SEQ ID NO: 1660 - protein, 41 aa, Eucommia ulmoides
  REGION 1..41: note = "Antimicrobial, Antifungal"; --NA--; "inhibits phytopathogenic fungi: P. infestans, A. lycopersici, V. dahliae, G. zeae, A. nicotinae, F"
JTCASRCPRPCNAGLCCSIYGYCGSGNAYCGAGNCRCQCRG

SEQ ID NO: 1661 - protein, 47 aa, Pachyrhizus erosus
  REGION 1..47: note = "Antimicrobial, Antifungal"; Defensin; "is active against fungi: Aspergillus flavus (IC50=30 g/ml), Aspergillus niger (IC50=45 micro-g/ml), Bip"
KTCENLADTFRGPCFTDGSCDDHCKNKEHLIKGRCRDDFRCWCTRNC

SEQ ID NO: 1662 - protein, 47 aa, Phaseolus vulgaris
  REGION 1..47: note = "Antimicrobial, Antifungal"; Defensin; "possesses antifungal activity against Fusarium solani, Fusarium laterithium, Rizoctonia solani and"
KTCENLADTYKGPCFTTGSCDDHCKNKEHLRSGRCRDDFRCWCTKNC

SEQ ID NO: 1663 - protein, 47 aa, Pisum sativum
  REGION 1..47: note = "Antimicrobial, Antifungal"; Defensin; possesses antifungal activity sensitive to inorganic cations
KTCENLSGTFKGPCIPDGNCNKHCRNNEHLISGRCRDDFRCWCTNRC

SEQ ID NO: 1664 - protein, 47 aa, Vitis vinifera
  REGION 1..47: note = "Antimicrobial, Antifungal"; --NA--; --NA--
KTCESQSHRFKGTCVRHSNCAAVCQTEGFHGGNCRGFRRRCFCTKHC

SEQ ID NO: 1665 - protein, 8 aa, Psammosilene tunicoides
  REGION 1..8: note = "Antimicrobial, Antifungal"; --NA--; "is active against Candida albicans (SC5314), Candida albicans (Y0109), Candida tropicalis, Candida"
PPWHGVNI

SEQ ID NO: 1666 - protein, 41 aa, Morus sp.
  REGION 1..41: note = "Antimicrobial, Antifungal"; Hevein; inhibits fungal growth
PQCGRDAGGALCHGNLCCSHWGFCGTTAIYCDVDQGCQSQC

SEQ ID NO: 1667 - protein, 7 aa, Psammosilene tunicoides
  REGION 1..7: note = "Antimicrobial, Antifungal"; --NA--; --NA--
PSWLAGT

SEQ ID NO: 1668 - protein, 7 aa, Psammosilene tunicoides
  REGION 1..7: note = "Antimicrobial, Antifungal"; --NA--; --NA--
PSWLVGS

SEQ ID NO: 1669 - protein, 46 aa, Echinochloa crus-galli
  REGION 1..46: note = Echinochloa crus-galli; "Antimicrobial, Antifungal"; Defensin; inhibits spore germination of Fusarium graminearum (IC50=15 micro-g/ml) and Fusarium verticillioides (I
RECQSQSHRYKGACVHDTNCASVCQTEGFSGKCVGFRGRCFCTKAC

SEQ ID NO: 1670 - protein, 46 aa, Echinochloa crus-galli
  REGION 1..46: note = Echinochloa crus-galli; "Antimicrobial, Antifungal"; Defensin; inhibits hyphal development of Phytophthora infestans (IC50=50 micro-g/ml).
RECQSQSHRYKGACVHDTNCASVCQTEGFSGKCVGFRGRCFCTKHC

SEQ ID NO: 1671 - protein, 47 aa, Vitis vinifera
  REGION 1..47: note = "Antimicrobial, Antifungal"; --NA--; --NA--
RTCDSQSHRFKGTCVTHINCAAVCHTDGFHGRNCRGFRRPCFCTKHC

SEQ ID NO: 1672 - protein, 45 aa, Medicago sativa
  REGION 1..45: note = "Antimicrobial, Antifungal"; --NA--; is active against fungal pathogen Verticillium dahliae
RTCENLADKYRGPCFSGCDTHCTTKENAYSGRCRDDFRCWCTKRC

SEQ ID NO: 1673 - protein, 47 aa, Helianthus annuus
  REGION 1..47: note = "Antimicrobial, Antifungal"; Defensin; is active against fungus Sclerotinia sclerotiorum.
RTCESQSHKFKGTCLSDYNCANVCHSERFSGGKCRGFRRRCFCTTHC

SEQ ID NO: 1674 - protein, 27 aa, Arabidopsis thaliana
  REGION 1..27: note = "Antimicrobial, Antifungal"; --NA--; induces the production of plant defensin (PDF1.2) and of H(2)O(2). Promotes resistnce to the root
SLNVMRKGIRKQPVSSGKRGGVNDYDM

SEQ ID NO: 1675 - protein, 23 aa, Arabidopsis thaliana
  REGION 1..23: note = "Antimicrobial, Antifungal"; --NA--; induces the production of plant defensin (PDF1.2) and of H(2)O(2). Promotes resistnce to the root
VSGNVAARKGKQQTSSGKGGGTN

SEQ ID NO: 1676 - protein, 37 aa, Avena sativa
  REGION 1..37: note = "Antimicrobial, Antifungal"; --NA--; inhibits fungal growth
WSGCSPCPGNECCSKYGYCGLGGDYCGAGCQSGPCYG

SEQ ID NO: 1677 - protein, 33 aa, Cucumis melo
  REGION 1..33: note = "Antimicrobial, Antifungal"; --NA--; "possesses antifungal activity against a number of phytopathogenic fungi, including Helminthosporiu"
YKRGGGGWGGGGGWKGGGGGGGGWKGGGGGGKG

SEQ ID NO: 1678 - protein, 34 aa, Cucumis melo
  REGION 1..34: note = "Antimicrobial, Antifungal"; --NA--; "possesses antifungal activity against a number of phytopathogenic fungi, including Helminthosporiu"
YKRGGGGWGGGGGWKGGGGGGGGWKGGGGGGKGG

SEQ ID NO: 1679 - protein, 35 aa, Cucumis melo
  REGION 1..35: note = "Antimicrobial, Antifungal"; --NA--; "possesses antifungal activity against a number of phytopathogenic fungi, including Helminthosporiu"
YKRGGGGWGGGGGWKGGGGGGGGWKGGGGGGKGGG

SEQ ID NO: 1680 - protein, 20 aa, Dahlia merckii
  REGION 1..20: note = "Antimicrobial, Antifungal"; Defensin; is active against fungi
EVCEKASKTWSGNCGNTGHC

SEQ ID NO: 1681 - protein, 46 aa, Pisum sativum
  REGION 1..46: note = "Antimicrobial, Antifungal"; Defensin; possesses antifungal activity
NTCEHLADTYRGVCFTNASCDDHCKNKAHLISGTCHDWKCFCTQNC

SEQ ID NO: 1682 - protein, 45 aa, Hevea brasiliensis
  REGION 1..45: note = "Antimicrobial, Antifungal"; Hevein; inhibits fungal growth
EQCGRQAGGKLCPNNLCCSQYGWCGSSDDYCSPSKNCQSNCKGGG

SEQ ID NO: 1683 - protein, 18 aa, Medicago truncatula
  REGION 1..18: note = "Antimicrobial, Antifungal"; --NA--; This peptide is used primarily to inhibit the growth of fungal plant pathogens
GACHRQGFGFACFCYKKC

SEQ ID NO: 1684 - protein, 22 aa, Theobroma cacao
  REGION 1..22: note = "Antimicrobial, Antifungal"; --NA--; Shows antifungal activity. Cacao osmotin and its derived peptides are good candidates for developi
GGVWNLNVNPGTTGARVWARTK

SEQ ID NO: 1685 - protein, 15 aa, Medicago truncatula
  REGION 1..15: note = "Antimicrobial, Antifungal"; --NA--; This peptide is used primarily to inhibit the growth of fungal plant pathogens
GRCRDDFRCWCTKRC

SEQ ID NO: 1686 - protein, 16 aa, Medicago truncatula
  REGION 1..16: note = "Antimicrobial, Antifungal"; --NA--; This peptide is used primarily to inhibit the growth of fungal plant pathogens
GRCRGFRRRCFCTTHC

SEQ ID NO: 1687 - protein, 81 aa, Pinus sylvestris
  REGION 1..81: note = "Antimicrobial, Antifungal"; --NA--; Used as plant defensins against fungi and bacteria
MAGKGVGSRLSTLFLLVLLVITIGMMQVQVAEGRMCKTPSGKFKGYCVNNTNCKNVCRTEGFPTGSCDFHVAGRKCYKPCP

SEQ ID NO: 1688 - protein, 27 aa, Theobroma cacao
  REGION 1..27: note = "Antimicrobial, Antifungal"; --NA--; Shows antifungal activity. Cacao osmotin and its derived peptides are good candidates for developi
RRLDRGGVWNLNVNPGTTGARVWARTK

SEQ ID NO: 1689 - protein, 21 aa, Wasabia japonica
  REGION 1..21: note = "Antimicrobial, Antifungal"; Hevein; Affect membranes of microorganisms resulting in the formation of membrane pores and leakage of cyt
TGESAADVRATYHFYDPEQDD

SEQ ID NO: 1690 - protein, 29 aa, Solanum tuberosum
  REGION 1..29: note = "Antimicrobial, Antifungal"; --NA--; "PG-2 may be a good candidate to serve as a natural antimicrobial agent, agricultural pesticide and"
LVKDNPLDISPKQVQALCTDLVIRCMCCC

SEQ ID NO: 1691 - protein, 45 aa, Triticum kiharae
  REGION 1..45: note = "Antimicrobial, Antifungal"; --NA--; "This block the fungalysin activity, keeping the chitinase intact. Thus, WAMPs represent novel prot"
AQRCGDQARGAKCPNCLCCGKYGFCGSGDAYCGAGSCQSQCRGCR

SEQ ID NO: 1692 - protein, 45 aa, Pisum sativum
  REGION 1..45: note = "Antimicrobial, Antifungal"; Defensin; Contribute to non-host resistance in plants; contacts with the plant pathogen fungus Fusarium sola
NTCENLAGSYKGVCFGGCDRHCRTQEGAISGRCRDDFRCWCTKNC

SEQ ID NO: 1693 - protein, 43 aa, Hevea brasiliensis
  REGION 1..43: note = "Antimicrobial, Antifungal"; Hevein; inhibits fungal growth
EQCGRQAGGKLCPNNLCCSQWGWCGSTDEYCSPDHNCQSNCKD

SEQ ID NO: 1694 - protein, 47 aa, Solanum lycopersicum
  REGION 1..47: note = "Antimicrobial, Antifungal, Anticancer"; Defensin; --NA--
QICKAPSQTFPGLCFMDSSCRKYCIKEKFTGGHCSKLQRKCLCTKPC

SEQ ID NO: 1695 - protein, 46 aa, Solanum tuberosum
  REGION 1..46: note = "Antimicrobial, Antifungal, Enzyme-inhibitor"; --NA--; "Shows antimicrobial, protease inhibitory and antifungal activity but lacked hemolytic activity. It"
DICTCCAGTKGCNTTSANGAFICEGQSDPKKPKACPLNCDPHIAYA

SEQ ID NO: 1696 - protein, 29 aa, Viola hederacea
  REGION 1..29: note = "Antimicrobial, Anti-HIV, Antiviral"; Cyclotide; Shown to possess anti-HIV activity.
SAIACGESCVYIPCFIPGCSCRNRVCYLN

SEQ ID NO: 1697 - protein, 47 aa, Vitis vinifera
  REGION 1..47: note = "Antimicrobial, Antimicrobial, Antifungal, Enzyme-inhibitor"; --NA--; --NA--
RLCESQSHWFRGVCVSNHNCAVVCRNEHFVGGRCRGFRRRCFCTRNC

SEQ ID NO: 1698 - protein, 47 aa, Vitis vinifera
  REGION 1..47: note = "Antimicrobial, Antimicrobial, Antifungal, Enzyme-inhibitor"; --NA--; --NA--
RVCESQSHKFEGACMGDHNCALVCRNEGFSGGKCKGLRRRCFCTKLC

SEQ ID NO: 1699 - protein, 30 aa, Oldenlandia affinis
  REGION 1..30: note = "Antimicrobial, Antiparasitic"; Cyclotide; --NA--
GLPVCGETCFGGTCNTPGCSCSSWPICTRN

SEQ ID NO: 1700 - protein, 30 aa, Viola odorata
  REGION 1..30: note = "Antimicrobial, Antiparasitic"; Cyclotide; participates in a plant defense mechanism.
GTLPCESCVWIPCISSVVGCSCKSKVCYKN

SEQ ID NO: 1701 - protein, 29 aa, Viola hederacea
  REGION 1..29: note = "Antimicrobial, Antiviral"; Cyclotide; "participates in a plant defense mechanism, possesses anti-human immunodeficiency virus activity."
CGESCVYIPCFIPGCSCRNRVCYLNSAIA

SEQ ID NO: 1702 - protein, 30 aa, Viola hederacea
  REGION 1..30: note = "Antimicrobial, Antiviral"; Cyclotide; "participates in a plant defense mechanism, possesses anti-human immunodeficiency virus activity."
CGETCFGGTCNTPGCICDPWPVCTRNGLPV

SEQ ID NO: 1703 - protein, 30 aa, Viola hederacea
  REGION 1..30: note = "Antimicrobial, Antiviral"; Cyclotide; "participates in a plant defense mechanism, possesses anti-human immunodeficiency virus activity."
CGETCFTGTCYTNGCTCDPWPVCTRNGLPV

SEQ ID NO: 1704 - protein, 30 aa, Chassalia parvifolia
  REGION 1..30: note = "Antimicrobial, Antiviral"; --NA--; inhibits the cytopathic effects of in vitro HIV-I infection with EC50 values of 50-275 micro-M
KIPCGESCVWIPCLTDVFNCKCENKVCYHD

SEQ ID NO: 1705 - protein, 30 aa, Chassalia parvifolia
  REGION 1..30: note = "Antimicrobial, Antiviral"; --NA--; inhibits the cytopathic effects of in vitro HIV-I infection with EC50 values of 50-275 micro-M
NGIPCGESCVWIPCITSVAGCSCKSKVCYR

SEQ ID NO: 1706 - protein, 37 aa, Palicourea condensata
  REGION 1..37: note = "Antimicrobial, Antiviral"; --NA--; inhibits the in vitro cytopathic effects of HIV-IRF infection of CEM-SS cells with an EC50 value o
RNGDPTFCGETCRVIPVCTYSAALGCTCDDRSDGLCK

SEQ ID NO: 1707 - protein, 30 aa, Leonia cymosa
  REGION 1..30: note = "Antimicrobial, Antiviral"; --NA--; "participates in a plant defense mechanism, possesses anti-HIV activity."
SCVFIPCISAAIGCSCKNKVCYRNGFPCGE

SEQ ID NO: 1708 - protein, 31 aa, Leonia cymosa
  REGION 1..31: note = "Antimicrobial, Antiviral"; --NA--; "participates in a plant defense mechanism, possesses anti-HIV activity."
SCVFIPCISAAIGCSCKNKVCYRNGVIPCGE

SEQ ID NO: 1709 - protein, 30 aa, Leonia cymosa
  REGION 1..30: note = "Antimicrobial, Antiviral"; --NA--; "participates in a plant defense mechanism, possesses anti-HIV activity."
SCVFIPCLTTVAGCSCKNKVCYRNGIPCGE

SEQ ID NO: 1710 - protein, 28 aa, Leonia cymosa
  REGION 1..28: note = "Antimicrobial, Antiviral"; --NA--; "participates in a plant defense mechanism, possesses anti-HIV activity."
SCYVLPCFTVGCTCTSSQCFKNGTACGE

SEQ ID NO: 1711 - protein, 30 aa, Chassalia parvifolia
  REGION 1..30: note = "Antimicrobial, Antiviral, Anti-HIV"; Cyclotide; Target site: lipid bilayer; Circulins D inhibited the cytopathic effects of in vitro HIV-1 infecti
KIPCGESCVWIPCVTSIFNCKCENKVCYHD

SEQ ID NO: 1712 - protein, 29 aa, Chassalia parvifolia
  REGION 1..29: note = "Antimicrobial, Antiviral, Anti-HIV"; Cyclotide; Circulins F inhibited the cytopathic effects of in vitro HIV-1 infection; Target site: lipid bilay
AIPCGESCVWIPCISAAIGCSCKNKVCYR

SEQ ID NO: 1713 - protein, 30 aa, Leonia cymosa
  REGION 1..30: note = "Antimicrobial, Antiviral, Anti-HIV"; Cyclotide; Cycloviolins D shown to possess anti-HIV activity.
GFPCGESCVFIPCISAAIGCSCKNKVCYRN

SEQ ID NO: 1714 - protein, 30 aa, Leonia cymosa
  REGION 1..30: note = "Antimicrobial, Antiviral, Anti-HIV"; Cyclotide; Cycloviolins C shown to possess anti-HIV activity.
GIPCGESCVFIPCLTTVAGCSCKNKVCYRN

SEQ ID NO: 1715 - protein, 28 aa, Leonia cymosa
  REGION 1..28: note = "Antimicrobial, Antiviral, Anti-HIV"; Cyclotide; Cycloviolins B shown to possess anti-HIV activity.
GTACGESCYVLPCFTVGCTCTSSQCFKN

SEQ ID NO: 1716 - protein, 31 aa, Leonia cymosa
  REGION 1..31: note = "Antimicrobial, Antiviral, Anti-HIV"; Cyclotide; Cycloviolins Ashown to possess anti-HIV activity.
GVIPCGESCVFIPCISAAIGCSCKNKVCYRN

SEQ ID NO: 1717 - protein, 30 aa, Clitoria ternatea
  REGION 1..30: note = "Antimicrobial, Cytotoxic"; Cyclotide; Shows potent antimicrobial and cytotoxic activity.
GIPCGESCVFIPCISSVVGCSCKSKVCYNN

SEQ ID NO: 1718 - protein, 27 aa, Panicum laxum
  REGION 1..27: note = "Antimicrobial, Cytotoxic"; Cyclotide; Shows potent antimicrobial and cytotoxic activity.
QAFCGETCLLGKCYTPGCSCHTGICLK

SEQ ID NO: 1719 - protein, 27 aa, Panicum laxum
  REGION 1..27: note = "Antimicrobial, Cytotoxic"; Cyclotide; Shows potent antimicrobial and cytotoxic activity.
QAFCGETCVLGTCYTPGCSCNFGICLK

SEQ ID NO: 1720 - protein, 28 aa, Panicum laxum
  REGION 1..28: note = "Antimicrobial, Cytotoxic"; Cyclotide; Shows potent antimicrobial and cytotoxic activity.
QLPICGETCVLGRCYTPNCRCQYPICVR

SEQ ID NO: 1721 - protein, 28 aa, Panicum laxum
  REGION 1..28: note = "Antimicrobial, Cytotoxic"; Cyclotide; Shows potent antimicrobial and cytotoxic activity.
QLPICGETCVLGTCYTPGCSCAYPICAR

SEQ ID NO: 1722 - protein, 28 aa, Panicum laxum
  REGION 1..28: note = "Antimicrobial, Cytotoxic"; Cyclotide; Shows potent antimicrobial and cytotoxic activity.
QLPICGETCVLGTCYTPGCSCAYPICVR

SEQ ID NO: 1723 - protein, 30 aa, Clitoria ternatea
  REGION 1..30: note = "Antimicrobial, Cytotoxic"; Cyclotide; Shows potent antimicrobial and cytotoxic activity.
GIPCGESCVFIPCITGAIGCSCKSKVCYRD

SEQ ID NO: 1724 - protein, 30 aa, Clitoria ternatea
  REGION 1..30: note = "Antimicrobial, Cytotoxic"; Cyclotide; Shows potent antimicrobial and cytotoxic activity.
GIPCGESCVFIPCLTTVVGCSCKNKVCYNN

SEQ ID NO: 1725 - protein, 27 aa, Panicum laxum
  REGION 1..27: note = "Antimicrobial, Cytotoxic"; Cyclotide; Shows potent antimicrobial and cytotoxic activity.
QAFCGETCLLGTCYTPGCRCTAGICLK

SEQ ID NO: 1726 - protein, 26 aa, Panicum laxum
  REGION 1..26: note = "Antimicrobial, Cytotoxic"; Cyclotide; Shows potent antimicrobial and cytotoxic activity.
QDCGETCVLGTCYTPGCSCSAYPLCV

SEQ ID NO: 1727 - protein, 28 aa, Panicum laxum
  REGION 1..28: note = "Antimicrobial, Cytotoxic"; Cyclotide; Shows potent antimicrobial and cytotoxic activity.
QLPICGETCVLGTCYTPGCRCQYPICVR

SEQ ID NO: 1728 - protein, 31 aa, Clitoria ternatea
  REGION 1..31: note = "Antimicrobial, Cytotoxic"; Cyclotide; Shows potent antimicrobial and cytotoxic activity.
GVIPCGESCVFIPCISTVIGCSCKNKVCYRN

SEQ ID NO: 1729 - protein, 30 aa, Viola tricolor
  REGION 1..30: note = "Antimicrobial, Cytotoxic"; Cyclotide; possesses cytotoxic activity: IC50=0.6 micro-M (human lymphoma cell line U937 GTB) and 1 micro-M (human myel
CESCVWIPCITSAIGCSCKSKVCYRNGIPC

SEQ ID NO: 1730 - protein, 29 aa, Viola tricolor
  REGION 1..29: note = "Antimicrobial, Cytotoxic"; Cyclotide; possesses cytotoxic activity: IC50=4 micro-M (human lymphoma cell line U937 GTB) and 4 micro-M (human myelom
CETCVGGTCNTPGCSCSWPVCTRNGLPIC

SEQ ID NO: 1731 - protein, 29 aa, Viola tricolor
  REGION 1..29: note = "Antimicrobial, Cytotoxic"; Cyclotide; possesses cytotoxic activity: IC50=6 micro-M (human lymphoma cell line U937 GTB) and 3 micro-M (human myelom
CETCVGGTCNTPGCSCSWPVCTRNGLPVC

SEQ ID NO: 1732 - protein, 98 aa, Solanum tuberosum
  REGION 1..98: note = "Antimicrobial, Cytotoxic"; --NA--; It is used to kill spores of two potato pathogens in a dose-dependent manner without any deleterio
IVSMECKTIVSQYGEMIWDLLVSGVRPDQVCSQAGLCFVDGAQHVSSNIKTVVERETEGSSVGEAPLCTACEMAVVWMQNQLKQEGTKEKVIEYVNQL

SEQ ID NO: 1733 - protein, 31 aa, Viola odorata
  REGION 1..31: note = "Antimicrobial, Cytotoxic, Anti-HIV, Trypsin-inhibitor"; Cyclotide; "Shows potent antimicrobial, cytotoxic and enzymatic activity; participates in a plant defense mech"
GSIPCAESCVYIPCFTGIAGCSCKNKVCYYN

SEQ ID NO: 1734 - protein, 31 aa, Viola odorata
  REGION 1..31: note = "Antimicrobial, Cytotoxic, Anti-HIV, Trypsin-inhibitor"; Cyclotide; "Shows potent antimicrobial, cytotoxic and enzymatic activity, participates in a plant defense mech"
GSIPCAESCVYIPCITGIAGCSCKNKVCYYN

SEQ ID NO: 1735 - protein, 28 aa, Chassalia chartacea
  REGION 1..28: note = "Antimicrobial, Cytotoxic, Hemolytic"; Cyclotide; "Shown to possess antimicrobial, cytotoxic, and hemolytic activities and the oxidation of two Met r"
EYCGESCYLIPCFTPGCYCVSRQCVNKN

SEQ ID NO: 1736 - protein, 31 aa, Chassalia chartacea
  REGION 1..31: note = "Antimicrobial, Cytotoxic, Hemolytic"; Cyclotide; "Shown to possess antimicrobial, cytotoxic, and hemolytic activities and the oxidation of two Met r"
GFPCAESCVYIPCTVTALLGCSCRNRVCYRN

SEQ ID NO: 1737 - protein, 31 aa, Chassalia chartacea
  REGION 1..31: note = "Antimicrobial, Cytotoxic, Hemolytic"; Cyclotide; "Shown to possess antimicrobial, cytotoxic, and hemolytic activities and the oxidation of two Met r"
GIPCAESCVWIPCTITALMGCSCKNNVCYNN

SEQ ID NO: 1738 - protein, 31 aa, Chassalia chartacea
  REGION 1..31: note = "Antimicrobial, Cytotoxic, Hemolytic"; Cyclotide; "Shown to possess antimicrobial, cytotoxic, and hemolytic activities and the oxidation of two Met r"
GIPCAESCVYIPCTITALFGCSCKDKVCYNN

SEQ ID NO: 1739 - protein, 31 aa, Chassalia chartacea
  REGION 1..31: note = "Antimicrobial, Cytotoxic, Hemolytic"; Cyclotide; "Shown to possess antimicrobial, cytotoxic, and hemolytic activities and the oxidation of two Met r"
GIPCAESCVYIPCTITALLGCSCKDKVCYKN

SEQ ID NO: 1740 - protein, 30 aa, Chassalia chartacea
  REGION 1..30: note = "Antimicrobial, Cytotoxic, Hemolytic"; Cyclotide; "Shown to possess antimicrobial, cytotoxic, and hemolytic activities and the oxidation of two Met r"
GIPCGESCVFIPCISALLGCSCSNKVCYNN

SEQ ID NO: 1741 - protein, 30 aa, Chassalia chartacea
  REGION 1..30: note = "Antimicrobial, Cytotoxic, Hemolytic"; Cyclotide; "Shown to possess antimicrobial, cytotoxic, and hemolytic activities and the oxidation of two Met r"
GIPCGESCVFIPCVTTVIGCSCKDKVCYNN

SEQ ID NO: 1742 - protein, 30 aa, Chassalia chartacea
  REGION 1..30: note = "Antimicrobial, Cytotoxic, Hemolytic"; Cyclotide; "Shown to possess antimicrobial, cytotoxic, and hemolytic activities and the oxidation of two Met r"
GIPCGESCVWIPCISSALGCSCKNKVCYRN

SEQ ID NO: 1743 - protein, 31 aa, Chassalia chartacea
  REGION 1..31: note = "Antimicrobial, Cytotoxic, Hemolytic"; Cyclotide; "Shown to possess antimicrobial, cytotoxic, and hemolytic activities and the oxidation of two Met r"
GVIPCGESCVFIPCISSVIGCSCKNKVCYRN

SEQ ID NO: 1744 - protein, 31 aa, Chassalia chartacea
  REGION 1..31: note = "Antimicrobial, Cytotoxic, Hemolytic"; Cyclotide; "Shown to possess antimicrobial, cytotoxic, and hemolytic activities and the oxidation of two Met r"
GVIPCGESCVFIPCISSVVGCSCKNKVCYRN

SEQ ID NO: 1745 - protein, 31 aa, Chassalia chartacea
  REGION 1..31: note = "Antimicrobial, Cytotoxic, Hemolytic"; Cyclotide; "Shown to possess antimicrobial, cytotoxic, and hemolytic activities and the oxidation of two Met r"
GVPCAESCVYIPCTITALFGCSCKDKVCYNN

SEQ ID NO: 1746 - protein, 28 aa, Chassalia chartacea
  REGION 1..28: note = "Antimicrobial, Cytotoxic, Hemolytic"; Cyclotide; "Shown to possess antimicrobial, cytotoxic, and hemolytic activities and the oxidation of two Met r"
IPCGESCVYIPCISAVLGCSCQNKVCYR

SEQ ID NO: 1747 - protein, 29 aa, Chassalia chartacea
  REGION 1..29: note = "Antimicrobial, Cytotoxic, Hemolytic, Anticancer"; Cyclotide; "Shown to possess antimicrobial, cytotoxic, and hemolytic activities and the oxidation of two Met r"
GASCGETCFTGICFTAGCSCNPWPTCTRN

SEQ ID NO: 1748 - protein, 29 aa, Chassalia chartacea
  REGION 1..29: note = "Antimicrobial, Cytotoxic, Hemolytic, Anticancer"; Cyclotide; "Shown to possess antimicrobial, cytotoxic, and hemolytic activities and the oxidation of two Met r"
GDACGETCFTGICFTAGCSCNPWPTCTRN

SEQ ID NO: 1749 - protein, 29 aa, Chassalia chartacea
  REGION 1..29: note = "Antimicrobial, Cytotoxic, Hemolytic, Anticancer"; Cyclotide; "Shown to possess antimicrobial, cytotoxic, and hemolytic activities and the oxidation of two Met r"
GEYCGESCYLIPCFTPGCYCVSRQCVNKN

SEQ ID NO: 1750 - protein, 31 aa, Viola odorata
  REGION 1..31: note = "Antimicrobial, Enzymatic-degradation"; Cyclotide; Shows antimicrobial activity; participates in a plant defense mechanism.
GTLPCGESCVWIPCISAVVGCSCKSKVCYKN

SEQ ID NO: 1751 - protein, 30 aa, Viola arvensis
  REGION 1..30: note = Viola arvensis, Viola tricolor; "Antimicrobial, Enzymatic-degradation"; Cyclotide; Resist enzymatic degradation in biological fluids; participates in a plant defense mechanism.
GLPVCGETCFGGTCNTPGCSCDPWPMCSRN

SEQ ID NO: 1752 - protein, 29 aa, Viola arvensis
  REGION 1..29: note = Viola arvensis, Viola tricolor; "Antimicrobial, Enzymatic-degradation"; Cyclotide; Resist enzymatic degradation in biological fluids; participates in a plant defense mechanism.
GVPICGETCVGGTCNTPGCSCSWPVCTRN

SEQ ID NO: 1753 - protein, 30 aa, Viola arvensis
  REGION 1..30: note = Viola arvensis, Viola tricolor; "Antimicrobial, Enzymatic-degradation"; Cyclotide; "Resist enzymatic degradation in biological fluids, participates in a plant defense mechanism."
GVPVCGETCFGGTCNTPGCSCDPWPVCSRN

SEQ ID NO: 1754 - protein, 28 aa, Leptopetalum biflorum
  REGION 1..28: note = Leptopetalum biflorum, Hedyotis biflora; "Antimicrobial, Enzymatic-degradation"; Cyclotide; Shown to possess antimicrobial and enzymatic degradation activity.
IQCGESCVWIPCISSAWGCSCKNKICSS

SEQ ID NO: 1755 - protein, 30 aa, Leptopetalum biflorum
  REGION 1..30: note = Leptopetalum biflorum, Hedyotis biflora; "Antimicrobial, Enzymatic-degradation"; Cyclotide; Target site- Lipid Bilayer; Shown to possess antimicrobial and enzymatic degradation activity.
GTRCGETCFVLPCWSAKFGCYCQKGFCYRN

SEQ ID NO: 1756 - protein, 27 aa, Viola odorata
  REGION 1..27: note = Viola odorata, Psychotria leptothyrsa; "Antimicrobial, Enzymatic-degradation, Hemolytic"; Cyclotide; Shown to possess hemolytic and enzymatic digestion activity; participates in plant defense mechani
SAISCGETCFKFKCYTPRCSCSYPVCK

SEQ ID NO: 1757 - protein, 47 aa, Vigna unguiculata
  REGION 1..47: note = "Antimicrobial, Enzyme-inhibitor"; Defensin; efficiently inhibits alpha-amylases from the weevils Acanthoscelides obtectus and Zabrotes subfasc
KTCENLADTYRGPCFTTGSCDDHCKNKEHLLSGRCRDDVRCWCTRNC

SEQ ID NO: 1758 - protein, 30 aa, Clitoria ternatea
  REGION 1..30: note = "Antimicrobial, Immunomodulatory"; Cyclotide; Shown to possess antimicrobial activity.
GDLFKCGETCFGGTCYTPGCSCDYPICKNN

SEQ ID NO: 1759 - protein, 29 aa, Clitoria ternatea
  REGION 1..29: note = "Antimicrobial, Immunomodulatory"; Cyclotide; Shown to possess antimicrobial activity.
GFNSCSEACVYLPCFSKGCSCFKRQCYKN

SEQ ID NO: 1760 - protein, 30 aa, Clitoria ternatea
  REGION 1..30: note = "Antimicrobial, Immunomodulatory"; Cyclotide; Shown to possess antimicrobial activity.
SIPCGESCVYIPCLTTIVGCSCKNSVCYSN

SEQ ID NO: 1761 - protein, 30 aa, Clitoria ternatea
  REGION 1..30: note = "Antimicrobial, Immunomodulatory, Nematocide"; Cyclotide; Shown to possess antimicrobial activity.
GGSIPCGESCVFLPCFLPGCSCKSSVCYLN

SEQ ID NO: 1762 - protein, 31 aa, Clitoria ternatea
  REGION 1..31: note = "Antimicrobial, Immunomodulatory, Nematocide"; Cyclotide; Shown to possess antimicrobial activity.
GIPCGESCVFIPCTITALLGCSCKDKVCYKN

SEQ ID NO: 1763 - protein, 31 aa, Clitoria ternatea
  REGION 1..31: note = "Antimicrobial, Immunomodulatory, Nematocide, Anticancer"; Cyclotide; "Shown to possess antimicrobial activity, Target site: lipid bilayer"
GIPCGESCVYIPCTVTALLGCSCKDKVCYKN

SEQ ID NO: 1764 - protein, 30 aa, Hybanthus floribundus
  REGION 1..30: note = "Antimicrobial, Insecticidal"; Cyclotide; "Shown to possess insecticidal activity, participates in a plant defense mechanism."
SISCGETCTTFNCWIPNCKCNHHDKVCYWN

SEQ ID NO: 1765 - protein, 29 aa, Oldenlandia affinis
  REGION 1..29: note = "Antimicrobial, Insecticidal"; Cyclotide; "Shown to possess insecticidal activity, participates in a plant defense mechanism."
GLPVCGESCFGGSCYTPGCSCTWPICTRD

SEQ ID NO: 1766 - protein, 30 aa, Oldenlandia affinis
  REGION 1..30: note = "Antimicrobial, Insecticidal"; Cyclotide; "Shown to possess insecticidal activity, participates in a plant defense mechanism."
GLPVCGESCFGGTCNTPGCACDPWPVCTRD

SEQ ID NO: 1767 - protein, 29 aa, Oldenlandia affinis
  REGION 1..29: note = "Antimicrobial, Insecticidal"; Cyclotide; "Shown to possess insecticidal activity, participates in a plant defense mechanism."
GLPVCGETCFGGTCNTPGCSCTDPICTRD

SEQ ID NO: 1768 - protein, 29 aa, Viola hederacea
  REGION 1..29: note = Viola hederacea, Oldenlandia affinis; "Antimicrobial, Insecticidal"; Cyclotide; Shows potent insecticidal and antimicrobial activity; participates in a plant defense mechanism
GLPVCGETCVGGTCNTPGCTCSWPVCTRD

SEQ ID NO: 1769 - protein, 32 aa, Hybanthus floribundus
  REGION 1..32: note = "Antimicrobial, Insecticidal"; Cyclotide; Shown to possess insecticidal activity.
GSPIQCAETCFIGKCYTEELGCTCTAFLCMKN

SEQ ID NO: 1770 - protein, 32 aa, Hybanthus floribundus
  REGION 1..32: note = "Antimicrobial, Insecticidal"; Cyclotide; Shown to possess insecticidal activity; participates in a plant defense mechanism.
GSPRQCAETCFIGKCYTEELGCTCTAFLCMKN

SEQ ID NO: 1771 - protein, 31 aa, Oldenlandia affinis
  REGION 1..31: note = "Antimicrobial, Insecticidal"; Cyclotide; "Shown to possess insecticidal activity, participates in a plant defense mechanism."
GSVFNCGETCVLGTCYTPGCTCNTYRVCTKD

SEQ ID NO: 1772 - protein, 31 aa, Hybanthus floribundus
  REGION 1..31: note = "Antimicrobial, Insecticidal"; Cyclotide; Shown to possess insecticidal activity; participates in a plant defense mechanism.
SISCGESCVYIPCTVTALVGCTCKDKVCYLN

SEQ ID NO: 1773 - protein, 29 aa, Viola odorata
  REGION 1..29: note = Viola odorata, Viola tricolor; "Antimicrobial, Insecticidal"; Cyclotide; "Probably participates in a plant defense mechanism, Shows potent insecticidal and antimicrobial ac"
GLPVCGETCTLGKCYTAGCSCSWPVCYRN

SEQ ID NO: 1774 - protein, 30 aa, Oldenlandia affinis
  REGION 1..30: note = "Antimicrobial, Insecticidal"; Cyclotide; Shown to possess insecticidal activity; participates in a plant defense mechanism.
GIPCAESCVYIPCTITALLGCKCKDQVCYN

SEQ ID NO: 1775 - protein, 30 aa, Oldenlandia affinis
  REGION 1..30: note = "Antimicrobial, Insecticidal"; Cyclotide; Shown to possess insecticidal activity; participates in a plant defense mechanism.
GIPCAESCVYIPCTITALLGCKCQDKVCYD

SEQ ID NO: 1776 - protein, 30 aa, Oldenlandia affinis
  REGION 1..30: note = "Antimicrobial, Insecticidal"; Cyclotide; participates in a plant defense mechanism.; Shown to possess insecticidal activity.
GLPTCGETCFGGTCNTPGCSCSSWPICTRD

SEQ ID NO: 1777 - protein, 28 aa, Oldenlandia affinis
  REGION 1..28: note = "Antimicrobial, Insecticidal, Antifungal"; Cyclotide; "Participate in the innate immune response of plants, therapeutically useful as anticancer agents a"
GSLCGDTCFVLGCNDSSCSCNYPICVKD

SEQ ID NO: 1778 - protein, 30 aa, Viola odorata
  REGION 1..30: note = "Antimicrobial, Insecticidal, Enzymatic-degradation"; Cyclotide; Shown to possess insecticidal and enzymatic digestion activity; participates in a plant defense me
GIPCGESCVWIPCISAAIGCSCKNKVCYRN

SEQ ID NO: 1779 - protein, 30 aa, Viola odorata
  REGION 1..30: note = Viola odorata, Viola tricolor; "Antimicrobial, Insecticidal, Enzymatic-degradation"; Cyclotide; Shown to possess insecticidal and enzymatic digestion activity; participates in a plant defense me
GIPCGESCVWIPCLTSAIGCSCKSKVCYRD

SEQ ID NO: 1780 - protein, 30 aa, Viola odorata
  REGION 1..30: note = "Antimicrobial, Insecticidal, Enzymatic-degradation"; Cyclotide; "Shown to possess insecticidal and enzymatic digestion activity, participates in a plant defense me"
GIPCGESCVYIPCTVTALAGCKCKSKVCYN

SEQ ID NO: 1781 - protein, 29 aa, Clitoria ternatea
  REGION 1..29: note = "Antimicrobial, Insecticidal, Hemolytic, Anthelmintic, Antibacterial, Cytotoxic"; Cyclotide; Shown to possess various antimicrobial and cytotoxic activities.
HEPCGESCVFIPCITTVVGCSCKNKVCYD

SEQ ID NO: 1782 - protein, 29 aa, Clitoria ternatea
  REGION 1..29: note = "Antimicrobial, Insecticidal, Hemolytic, Anthelmintic, Antibacterial, Cytotoxic"; Cyclotide; Shown to possess various antimicrobial and cytotoxic activities.
HEPCGESCVFIPCITTVVGCSCKNKVCYN

SEQ ID NO: 1783 - protein, 30 aa, Viola hederacea
  REGION 1..30: note = "Antimicrobial, Nematocide, Antiviral"; Cyclotide; Shown to possess nematocidal activity; 50% Hemolysis against Human erythrocytes at 6.6   1.3 micro-M
GLPVCGETCFGGTCNTPGCICDPWPVCTRN

SEQ ID NO: 1784 - protein, 29 aa, Viola odorata
  REGION 1..29: note = "Antimicrobial, Nematocide, Enzymatic-degradation"; Cyclotide; Showed significant nematocidal and enzymatic digestion activity; Probably participates in a plant
GLPCGETCFTGKCYTPGCSCSYPICKKIN

SEQ ID NO: 1785 - protein, 30 aa, Viola odorata
  REGION 1..30: note = "Antimicrobial, Nematocide, Hemolytic, Anti-HIV, Antiviral"; Cyclotide; "Participate in the innate immune response of plants, therapeutically useful as anticancer agents a"
GIPCAESCVWIPCTVTALVGCSCSDKVCYN

SEQ ID NO: 1786 - protein, 47 aa, Hordeum vulgare
  REGION 1..47: note = "Antimicrobial, Protein-translation-inhibitor"; Defensin; inhibits protein translation in cell free system
RICRRRSAGFKGPCVSNKNCAQVCMQEGWGGGNCDGPLRRCKCMRRC

SEQ ID NO: 1787 - protein, 45 aa, Hordeum vulgare
  REGION 1..45: note = "Antimicrobial, Toxin"; Thionin; is toxic to animal cells
KSCCRSTLGRNCYNLCRVRGAQKLCAGVCRCKLTSSGKCPTGFPK

SEQ ID NO: 1788 - protein, 46 aa, Dendrophthora clavata
  REGION 1..46: note = Dendrophthora clavata, Hordeum vulgare; "Antimicrobial, Toxin"; Thionin; is toxic to animal cells
KSCCPTTAARNQYNICRLPGTPRPVCAALSGCKIISGTGCPPGYRH

SEQ ID NO: 1789 - protein, 46 aa, Phoradendron tomentosum
  REGION 1..46: note = "Antimicrobial, Toxin"; Thionin; is toxic to animal cells
KSCCPTTTARNIYNTCRFGGGSRPVCAKLSGCKIISGTKCDSGWNH

SEQ ID NO: 1790 - protein, 46 aa, Helleborus purpurascens
  REGION 1..46: note = "Antimicrobial, Toxin"; Thionin; is toxic to animal cells. It seems to exert its toxic effect at the level of the cell membranes.
KSCCRNTLARNCYNACRFTGGSQPTCGILCDCIHVTTTTCPSSHPS

SEQ ID NO: 1791 - protein, 5 aa, Spinacia oleracea
  REGION 1..5: note = "Antinociceptive, ACE-inhibitor, Antihypertensive"; --NA--; Rubiscolin enhanced memory consolidation at an oral dose and also exerted an anxiolytic-like effec
YPLDL

SEQ ID NO: 1792 - protein, 8 aa, Oryza sativa
  REGION 1..8: note = Antioxidant; --NA--; --NA--
AIRQGDVF

SEQ ID NO: 1793 - protein, 7 aa, Cicer arietinum
  REGION 1..7: note = Antioxidant; --NA--; --NA--
ALEPDHR

SEQ ID NO: 1794 - protein, 5 aa, Olea europaea
  REGION 1..5: note = Antioxidant; --NA--; --NA--
DDLPR

SEQ ID NO: 1795 - protein, 11 aa, Oryza sativa
  REGION 1..11: note = Antioxidant; --NA--; --NA--
DHHQVYSPGEQ

SEQ ID NO: 1796 - protein, 6 aa, Olea europaea
  REGION 1..6: note = Antioxidant; --NA--; --NA--
FDGEVK

SEQ ID NO: 1797 - protein, 8 aa, Zea mays
  REGION 1..8: note = Antioxidant; --NA--; --NA--
FPLEMMPF

SEQ ID NO: 1798 - protein, 5 aa, Glycine max
  REGION 1..5: note = Antioxidant; --NA--; --NA--
HHPLL

SEQ ID NO: 1799 - protein, 7 aa, Olea europaea
  REGION 1..7: note = Antioxidant; --NA--; --NA--
HVAGTVA

SEQ ID NO: 1800 - protein, 8 aa, Oryza sativa
  REGION 1..8: note = Antioxidant; --NA--; --NA--
KHNRGDEF

SEQ ID NO: 1801 - protein, 6 aa, Glycine max
  REGION 1..6: note = Antioxidant; --NA--; --NA--
LLPHHH

SEQ ID NO: 1802 - protein, 16 aa, Glycine max
  REGION 1..16: note = Antioxidant; --NA--; --NA--
LNSGDALRVPSGTTYY

SEQ ID NO: 1803 - protein, 6 aa, Hordeum vulgare
  REGION 1..6: note = Antioxidant; --NA--; --NA--
LRTLPM

SEQ ID NO: 1804 - protein, 5 aa, Olea europaea
  REGION 1..5: note = Antioxidant; --NA--; --NA--
MDGAP

SEQ ID NO: 1805 - protein, 5 aa, Olea europaea
  REGION 1..5: note = Antioxidant; --NA--; --NA--
MGSPT

SEQ ID NO: 1806 - protein, 5 aa, Oryza sativa
  REGION 1..5: note = Antioxidant; --NA--; --NA--
NFHPQ

SEQ ID NO: 1807 - protein, 7 aa, Hordeum vulgare
  REGION 1..7: note = Antioxidant; --NA--; --NA--
PQIPEQF

SEQ ID NO: 1808 - protein, 10 aa, Hordeum vulgare
  REGION 1..10: note = Antioxidant; --NA--; --NA--
QKPFPQQPPF

SEQ ID NO: 1809 - protein, 7 aa, Oryza sativa
  REGION 1..7: note = Antioxidant; --NA--; --NA--
RPNYTDA

SEQ ID NO: 1810 - protein, 8 aa, Cicer arietinum
  REGION 1..8: note = Antioxidant; --NA--; --NA--
SAEHGSLH

SEQ ID NO: 1811 - protein, 6 aa, Hordeum vulgare
  REGION 1..6: note = Antioxidant; --NA--; --NA--
SVNVPL

SEQ ID NO: 1812 - protein, 11 aa, Cicer arietinum
  REGION 1..11: note = Antioxidant; --NA--; --NA--
TETWNPNHPEL

SEQ ID NO: 1813 - protein, 8 aa, Oryza sativa
  REGION 1..8: note = Antioxidant; --NA--; --NA--
TRTGDPFF

SEQ ID NO: 1814 - protein, 8 aa, Oryza sativa
  REGION 1..8: note = Antioxidant; --NA--; --NA--
TSQLLSDQ

SEQ ID NO: 1815 - protein, 7 aa, Olea europaea
  REGION 1..7: note = Antioxidant; --NA--; --NA--
VGAPSVS

SEQ ID NO: 1816 - protein, 7 aa, Olea europaea
  REGION 1..7: note = Antioxidant; --NA--; --NA--
VGPLSPT

SEQ ID NO: 1817 - protein, 9 aa, Olea europaea
  REGION 1..9: note = Antioxidant; --NA--; --NA--
VLDTGLAGA

SEQ ID NO: 1818 - protein, 9 aa, Oryza sativa
  REGION 1..9: note = Antioxidant; --NA--; --NA--
VLEANPRSF

SEQ ID NO: 1819 - protein, 9 aa, Olea europaea
  REGION 1..9: note = Antioxidant; --NA--; --NA--
VLSPPFTGE

SEQ ID NO: 1820 - protein, 6 aa, Olea europaea
  REGION 1..6: note = Antioxidant; --NA--; --NA--
VPLSPT

SEQ ID NO: 1821 - protein, 6 aa, Olea europaea
  REGION 1..6: note = Antioxidant; --NA--; --NA--
VVVVPH

SEQ ID NO: 1822 - protein, 12 aa, Oryza sativa
  REGION 1..12: note = Antioxidant; --NA--; --NA--
YFPVGGDRPESF

SEQ ID NO: 1823 - protein, 5 aa, Glycine max
  REGION 1..5: note = Antioxidant; --NA--; --NA--
LLPHH

SEQ ID NO: 1824 - protein, 10 aa, Glycine max
  REGION 1..10: note = Antioxidant; --NA--; --NA--
LLPHHADADY

SEQ ID NO: 1825 - protein, 9 aa, Glycine max
  REGION 1..9: note = Antioxidant; --NA--; --NA--
LVNPHDHQN

SEQ ID NO: 1826 - protein, 7 aa, Glycine max
  REGION 1..7: note = Antioxidant; --NA--; --NA--
VIPAGYP

SEQ ID NO: 1827 - protein, 8 aa, Glycine max
  REGION 1..8: note = Antioxidant; --NA--; --NA--
VNPHDHQN

SEQ ID NO: 1828 - protein, 16 aa, Glycine max
  REGION 1..16: note = Antioxidant; --NA--; --NA--
LQSGDALRVPSGTTYY

SEQ ID NO: 1829 - protein, 12 aa, Angelica sinensis
  REGION 1..12: note = Antioxidant; --NA--; Used to delay aging process in C. elegans through antioxidant activities independent of dietary re
AAPFPGQKSLQR

SEQ ID NO: 1830 - protein, 13 aa, Phaseolus vulgaris
  REGION 1..13: note = Antioxidant; --NA--; Shows inhibitory effects of antioxidant and  -amylase.
ACSNHSPLGWRGH

SEQ ID NO: 1831 - protein, 7 aa, Pisum sativum
  REGION 1..7: note = Antioxidant; --NA--; Shows significant antioxidant activity i.e. able to scavenge superoxide anion and hydroxyl radical
AEYVRLY

SEQ ID NO: 1832 - protein, 10 aa, Angelica sinensis
  REGION 1..10: note = Antioxidant; --NA--; Used to delay aging process in C. elegans through antioxidant activities independent of dietary re
AGFAGDDAPR

SEQ ID NO: 1833 - protein, 9 aa, Angelica sinensis
  REGION 1..9: note = Antioxidant; --NA--; Used to delay aging process in C. elegans through antioxidant activities independent of dietary re
AGLQFPVGR

SEQ ID NO: 1834 - protein, 6 aa, Triticum aestivum
  REGION 1..6: note = Antioxidant; --NA--; Shows significant antioxidant activity i.e. able to scavenge superoxide anion and hydroxyl radical
AIILHQ

SEQ ID NO: 1835 - protein, 7 aa, Triticum aestivum
  REGION 1..7: note = Antioxidant; --NA--; Shows significant antioxidant activity i.e. able to scavenge superoxide anion and hydroxyl radical
AIILHQQ

SEQ ID NO: 1836 - protein, 8 aa, Triticum aestivum
  REGION 1..8: note = Antioxidant; --NA--; Shows significant antioxidant activity i.e. able to scavenge superoxide anion and hydroxyl radical
AIILHQQQ

SEQ ID NO: 1837 - protein, 9 aa, Angelica sinensis
  REGION 1..9: note = Antioxidant; --NA--; Used to delay aging process in C. elegans through antioxidant activities independent of dietary re
AMPVEVVQF

SEQ ID NO: 1838 - protein, 10 aa, Triticum aestivum
  REGION 1..10: note = Antioxidant; --NA--; Shows significant antioxidant activity i.e. able to scavenge superoxide anion and hydroxyl radical
AQGTFLQPHQ

SEQ ID NO: 1839 - protein, 11 aa, Angelica sinensis
  REGION 1..11: note = Antioxidant; --NA--; Used to delay aging process in C. elegans through antioxidant activities independent of dietary re
AVFPSIVGRPR

SEQ ID NO: 1840 - protein, 6 aa, Angelica sinensis
  REGION 1..6: note = Antioxidant; --NA--; Used to delay aging process in C. elegans through antioxidant activities independent of dietary re
DLTDFL

SEQ ID NO: 1841 - protein, 16 aa, Angelica sinensis
  REGION 1..16: note = Antioxidant; --NA--; Used to delay aging process in C. elegans through antioxidant activities independent of dietary re
EGGDGGYGGGGGGSRW

SEQ ID NO: 1842 - protein, 17 aa, Angelica sinensis
  REGION 1..17: note = Antioxidant; --NA--; Used to delay aging process in C. elegans through antioxidant activities independent of dietary re
EGGGGGYGGGGGGYGGR

SEQ ID NO: 1843 - protein, 9 aa, Pisum sativum
  REGION 1..9: note = Antioxidant; --NA--; Shows significant antioxidant activity i.e. able to scavenge superoxide anion and hydroxyl radical
ENLQNYRLL

SEQ ID NO: 1844 - protein, 9 aa, Angelica sinensis
  REGION 1..9: note = Antioxidant; --NA--; Used to delay aging process in C. elegans through antioxidant activities independent of dietary re
ESTAKQVIR

SEQ ID NO: 1845 - protein, 9 aa, Triticum dicoccum
  REGION 1..9: note = Antioxidant; --NA--; Shows significant antioxidant activity i.e. able to scavenge superoxide anion and hydroxyl radical
ESTLHLVLR

SEQ ID NO: 1846 - protein, 25 aa, Triticum aestivum
  REGION 1..25: note = Antioxidant; --NA--; Shows significant antioxidant activity i.e. able to scavenge superoxide anion and hydroxyl radical
FLGQQQPFPPQQPYPQPQPFPSQQP

SEQ ID NO: 1847 - protein, 26 aa, Triticum aestivum
  REGION 1..26: note = Antioxidant; --NA--; Shows significant antioxidant activity i.e. able to scavenge superoxide anion and hydroxyl radical
FLGQQQPFPPQQPYPQPQPFPSQQPY

SEQ ID NO: 1848 - protein, 19 aa, Angelica sinensis
  REGION 1..19: note = Antioxidant; --NA--; Used to delay aging process in C. elegans through antioxidant activities independent of dietary re
GGGGYGGGGGGYGGGGGGY

SEQ ID NO: 1849 - protein, 11 aa, Angelica sinensis
  REGION 1..11: note = Antioxidant; --NA--; Used to delay aging process in C. elegans through antioxidant activities independent of dietary re
GGVLPNINPVL

SEQ ID NO: 1850 - protein, 10 aa, Sorghum bicolor
  REGION 1..10: note = Antioxidant; --NA--; GTS Protein produced peptides with strong free radical scavenging capacity upon enzymatic hydrolys
GLLGKNFTSK

SEQ ID NO: 1851 - protein, 11 aa, Pisum sativum
  REGION 1..11: note = Antioxidant; --NA--; Shows significant antioxidant activity i.e. able to scavenge superoxide anion and hydroxyl radical
GPIYSNEFGKF

SEQ ID NO: 1852 - protein, 12 aa, Pisum sativum
  REGION 1..12: note = Antioxidant; --NA--; Shows significant antioxidant activity i.e. able to scavenge superoxide anion and hydroxyl radical
GPIYSNEFGKFF

SEQ ID NO: 1853 - protein, 17 aa, Pisum sativum
  REGION 1..17: note = Antioxidant; --NA--; Shows significant antioxidant activity i.e. able to scavenge superoxide anion and hydroxyl radical
GPSSSPDIYNPEAGRIK

SEQ ID NO: 1854 - protein, 8 aa, Triticum aestivum
  REGION 1..8: note = Antioxidant; --NA--; Shows significant antioxidant activity i.e. able to scavenge superoxide anion and hydroxyl radical
GTFLQPHQ

SEQ ID NO: 1855 - protein, 11 aa, Angelica sinensis
  REGION 1..11: note = Antioxidant; --NA--; Used to delay aging process in C. elegans through antioxidant activities independent of dietary re
GTIAGGGVIPH

SEQ ID NO: 1856 - protein, 7 aa, Sorghum bicolor
  REGION 1..7: note = Antioxidant; --NA--; GTS Protein produced peptides with strong free radical scavenging capacity upon enzymatic hydrolys
HQTSEFK

SEQ ID NO: 1857 - protein, 11 aa, Angelica sinensis
  REGION 1..11: note = Antioxidant; --NA--; Used to delay aging process in C. elegans through antioxidant activities independent of dietary re
IGGIGTVPVGR

SEQ ID NO: 1858 - protein, 18 aa, Pisum sativum
  REGION 1..18: note = Antioxidant; --NA--; Shows significant antioxidant activity i.e. able to scavenge superoxide anion and hydroxyl radical
IGPSSSPDIYNPEAGRIK

SEQ ID NO: 1859 - protein, 16 aa, Angelica sinensis
  REGION 1..16: note = Antioxidant; --NA--; Used to delay aging process in C. elegans through antioxidant activities independent of dietary re
IIGATNPAESAPGTIR

SEQ ID NO: 1860 - protein, 7 aa, Triticum aestivum
  REGION 1..7: note = Antioxidant; --NA--; Shows significant antioxidant activity i.e. able to scavenge superoxide anion and hydroxyl radical
IILHQQQ

SEQ ID NO: 1861 - protein, 13 aa, Angelica sinensis
  REGION 1..13: note = Antioxidant; --NA--; Used to delay aging process in C. elegans through antioxidant activities independent of dietary re
IKGTIAGGGVIPH

SEQ ID NO: 1862 - protein, 26 aa, Angelica sinensis
  REGION 1..26: note = Antioxidant; --NA--; Used to delay aging process in C. elegans through antioxidant activities independent of dietary re
KKVGYNPDKIPFVPISGFEGDNMIER

SEQ ID NO: 1863 - protein, 11 aa, Triticum aestivum
  REGION 1..11: note = Antioxidant; --NA--; Shows significant antioxidant activity i.e. able to scavenge superoxide anion and hydroxyl radical
LAQGTFLQPHQ

SEQ ID NO: 1864 - protein, 14 aa, Angelica sinensis
  REGION 1..14: note = Antioxidant; --NA--; Used to delay aging process in C. elegans through antioxidant activities independent of dietary re
LASSGIDHEGRLPR

SEQ ID NO: 1865 - protein, 10 aa, Sorghum bicolor
  REGION 1..10: note = Antioxidant; --NA--; GTS Protein produced peptides with strong free radical scavenging capacity upon enzymatic hydrolys
LDSCKDYVME

SEQ ID NO: 1866 - protein, 8 aa, Angelica sinensis
  REGION 1..8: note = Antioxidant; --NA--; Used to delay aging process in C. elegans through antioxidant activities independent of dietary re
LTADILPR

SEQ ID NO: 1867 - protein, 15 aa, Angelica sinensis
  REGION 1..15: note = Antioxidant; --NA--; Used to delay aging process in C. elegans through antioxidant activities independent of dietary re
MIAFNKEQDTDLQSK

SEQ ID NO: 1868 - protein, 14 aa, Triticum dicoccum
  REGION 1..14: note = Antioxidant; --NA--; Shows significant antioxidant activity i.e. able to scavenge superoxide anion and hydroxyl radical
NSSYFVEWIPNNVK

SEQ ID NO: 1869 - protein, 7 aa, Angelica sinensis
  REGION 1..7: note = Antioxidant; --NA--; Used to delay aging process in C. elegans through antioxidant activities independent of dietary re
PSIVGRP

SEQ ID NO: 1870 - protein, 9 aa, Angelica sinensis
  REGION 1..9: note = Antioxidant; --NA--; Used to delay aging process in C. elegans through antioxidant activities independent of dietary re
QTVAVGVIK

SEQ ID NO: 1871 - protein, 18 aa, Angelica sinensis
  REGION 1..18: note = Antioxidant; --NA--; Used to delay aging process in C. elegans through antioxidant activities independent of dietary re
REGGGGGYGGGGGGYGGR

SEQ ID NO: 1872 - protein, 10 aa, Triticum dicoccum
  REGION 1..10: note = Antioxidant; --NA--; Shows significant antioxidant activity i.e. able to scavenge superoxide anion and hydroxyl radical
STTTGHLIYK

SEQ ID NO: 1873 - protein, 11 aa, Angelica sinensis
  REGION 1..11: note = Antioxidant; --NA--; Used to delay aging process in C. elegans through antioxidant activities independent of dietary re
TKMDEGVVTKK

SEQ ID NO: 1874 - protein, 10 aa, Pisum sativum
  REGION 1..10: note = Antioxidant; --NA--; Shows significant antioxidant activity i.e. able to scavenge superoxide anion and hydroxyl radical
TSLDLPVLRW

SEQ ID NO: 1875 - protein, 10 aa, Sorghum bicolor
  REGION 1..10: note = Antioxidant; --NA--; GTS Protein produced peptides with strong free radical scavenging capacity upon enzymatic hydrolys
TSVEIITSSK

SEQ ID NO: 1876 - protein, 10 aa, Angelica sinensis
  REGION 1..10: note = Antioxidant; --NA--; Used to delay aging process in C. elegans through antioxidant activities independent of dietary re
TTAGILLPEK

SEQ ID NO: 1877 - protein, 12 aa, Pisum sativum
  REGION 1..12: note = Antioxidant; --NA--; Shows significant antioxidant activity i.e. able to scavenge superoxide anion and hydroxyl radical
TVTSLDLPVLRW

SEQ ID NO: 1878 - protein, 17 aa, Triticum aestivum
  REGION 1..17: note = Antioxidant; --NA--; Shows significant antioxidant activity i.e. able to scavenge superoxide anion and hydroxyl radical
TVVPPKGGSFYPGETTP

SEQ ID NO: 1879 - protein, 20 aa, Triticum aestivum
  REGION 1..20: note = Antioxidant; --NA--; Shows significant antioxidant activity i.e. able to scavenge superoxide anion and hydroxyl radical
TVVPPKGGSFYPGETTPLQQ

SEQ ID NO: 1880 - protein, 8 aa, Sorghum bicolor
  REGION 1..8: note = Antioxidant; --NA--; GTS Protein produced peptides with strong free radical scavenging capacity upon enzymatic hydrolys
VAITLTMK

SEQ ID NO: 1881 - protein, 10 aa, Angelica sinensis
  REGION 1..10: note = Antioxidant; --NA--; Used to delay aging process in C. elegans through antioxidant activities independent of dietary re
VETGVIKPGM

SEQ ID NO: 1882 - protein, 6 aa, Triticum dicoccum
  REGION 1..6: note = Antioxidant; --NA--; Shows significant antioxidant activity i.e. able to scavenge superoxide anion and hydroxyl radical
VLLHLK

SEQ ID NO: 1883 - protein, 8 aa, Triticum aestivum
  REGION 1..8: note = Antioxidant; --NA--; Shows significant antioxidant activity i.e. able to scavenge superoxide anion and hydroxyl radical
VLPPQQQY

SEQ ID NO: 1884 - protein, 11 aa, Angelica sinensis
  REGION 1..11: note = Antioxidant; --NA--; Used to delay aging process in C. elegans through antioxidant activities independent of dietary re
VLVSGSIHYPR

SEQ ID NO: 1885 - protein, 9 aa, Triticum aestivum
  REGION 1..9: note = Antioxidant; --NA--; Shows significant antioxidant activity i.e. able to scavenge superoxide anion and hydroxyl radical
VMTVHNTPY

SEQ ID NO: 1886 - protein, 8 aa, Sorghum bicolor
  REGION 1..8: note = Antioxidant; --NA--; GTS Protein produced peptides with strong free radical scavenging capacity upon enzymatic hydrolys
VPPSKLSP

SEQ ID NO: 1887 - protein, 8 aa, Sorghum bicolor
  REGION 1..8: note = Antioxidant; --NA--; GTS Protein produced peptides with strong free radical scavenging capacity upon enzymatic hydrolys
VSKSVLVK

SEQ ID NO: 1888 - protein, 11 aa, Pisum sativum
  REGION 1..11: note = Antioxidant; --NA--; Shows significant antioxidant activity i.e. able to scavenge superoxide anion and hydroxyl radical
VTSLDLPVLRW

SEQ ID NO: 1889 - protein, 10 aa, Angelica sinensis
  REGION 1..10: note = Antioxidant; --NA--; Used to delay aging process in C. elegans through antioxidant activities independent of dietary re
VVVNIPPTLK

SEQ ID NO: 1890 - protein, 12 aa, Triticum dicoccum
  REGION 1..12: note = Antioxidant; --NA--; Shows significant antioxidant activity i.e. able to scavenge superoxide anion and hydroxyl radical
YFPTQALNFAFK

SEQ ID NO: 1891 - protein, 10 aa, Angelica sinensis
  REGION 1..10: note = Antioxidant; --NA--; Used to delay aging process in C. elegans through antioxidant activities independent of dietary re
YGVSGYPTLK

SEQ ID NO: 1892 - protein, 6 aa, Triticum aestivum
  REGION 1..6: note = Antioxidant; --NA--; Shows antioxidant activity and have some protective effect on the degradation of fatty acid.
AQIPQQ

SEQ ID NO: 1893 - protein, 9 aa, Triticum aestivum
  REGION 1..9: note = Antioxidant; --NA--; Shows antioxidant activity and have some protective effect on the degradation of fatty acid.
LQPGQGQQG

SEQ ID NO: 1894 - protein, 8 aa, Oryza sativa
  REGION 1..8: note = Antioxidant; --NA--; Shows antioxidant activity and produce natural antioxidants from rice endosperm protein (REP). It
KHDRGDEF

SEQ ID NO: 1895 - protein, 7 aa, Oryza sativa
  REGION 1..7: note = Antioxidant; --NA--; Shows antioxidant activity and produce natural antioxidants from rice endosperm protein (REP). It
FRDEHKK

SEQ ID NO: 1896 - protein, 7 aa, Glycine max
  REGION 1..7: note = "Antioxidant, ACE-inhibitor, Antihypertensive"; --NA--; --NA--
TIIPLPV

SEQ ID NO: 1897 - protein, 16 aa, Phaseolus vulgaris
  REGION 1..16: note = "Antioxidant, Alpha-amylase-inhibitor"; --NA--; Act as  -amylase inhibitor peptide and show the highest potency in the binding interaction.
LSSLEMGSLGALFVCM

SEQ ID NO: 1898 - protein, 5 aa, Prunus cerasus
  REGION 1..5: note = "Antioxidant, Antihypertensive"; --NA--; Peptide extracts obtained by the digestion of the cherry seed protein isolate with Alcalase and Th
AFGPE

SEQ ID NO: 1899 - protein, 5 aa, Prunus cerasus
  REGION 1..5: note = "Antioxidant, Antihypertensive"; --NA--; Peptide extracts obtained by the digestion of the cherry seed protein isolate with Alcalase and Th
DEVPR

SEQ ID NO: 1900 - protein, 8 aa, Prunus cerasus
  REGION 1..8: note = "Antioxidant, Antihypertensive"; --NA--; Peptide extracts obtained by the digestion of the cherry seed protein isolate with Alcalase and Th
DGDPLLDQ

SEQ ID NO: 1901 - protein, 17 aa, Parkia speciosa
  REGION 1..17: note = "Antioxidant, Antihypertensive"; --NA--; "Bioactive peptides exhibited the highest DPPH radical scavenging activity, reducing power and %ACE"
DSEGHRTAPCYVMKILF

SEQ ID NO: 1902 - protein, 7 aa, Prunus cerasus
  REGION 1..7: note = "Antioxidant, Antihypertensive"; --NA--; Peptide extracts obtained by the digestion of the cherry seed protein isolate with Alcalase and Th
ESGAVTE

SEQ ID NO: 1903 - protein, 7 aa, Prunus cerasus
  REGION 1..7: note = "Antioxidant, Antihypertensive"; --NA--; Peptide extracts obtained by the digestion of the cherry seed protein isolate with Alcalase and Th
FDAVGVK

SEQ ID NO: 1904 - protein, 7 aa, Prunus cerasus
  REGION 1..7: note = "Antioxidant, Antihypertensive"; --NA--; Peptide extracts obtained by the digestion of the cherry seed protein isolate with Alcalase and Th
FGPEMEQ

SEQ ID NO: 1905 - protein, 5 aa, Prunus cerasus
  REGION 1..5: note = "Antioxidant, Antihypertensive"; --NA--; Peptide extracts obtained by the digestion of the cherry seed protein isolate with Alcalase and Th
FVLGL

SEQ ID NO: 1906 - protein, 8 aa, Prunus cerasus
  REGION 1..8: note = "Antioxidant, Antihypertensive"; --NA--; Peptide extracts obtained by the digestion of the cherry seed protein isolate with Alcalase and Th
LAGNPENE

SEQ ID NO: 1907 - protein, 8 aa, Prunus cerasus
  REGION 1..8: note = "Antioxidant, Antihypertensive"; --NA--; Peptide extracts obtained by the digestion of the cherry seed protein isolate with Alcalase and Th
LAGNPQDE

SEQ ID NO: 1908 - protein, 5 aa, Prunus cerasus
  REGION 1..5: note = "Antioxidant, Antihypertensive"; --NA--; Peptide extracts obtained by the digestion of the cherry seed protein isolate with Alcalase and Th
LFSPR

SEQ ID NO: 1909 - protein, 5 aa, Prunus cerasus
  REGION 1..5: note = "Antioxidant, Antihypertensive"; --NA--; Peptide extracts obtained by the digestion of the cherry seed protein isolate with Alcalase and Th
LLAQA

SEQ ID NO: 1910 - protein, 5 aa, Prunus cerasus
  REGION 1..5: note = "Antioxidant, Antihypertensive"; --NA--; Peptide extracts obtained by the digestion of the cherry seed protein isolate with Alcalase and Th
LLNDE

SEQ ID NO: 1911 - protein, 10 aa, Prunus cerasus
  REGION 1..10: note = "Antioxidant, Antihypertensive"; --NA--; Peptide extracts obtained by the digestion of the cherry seed protein isolate with Alcalase and Th
LLNDEVKEGQ

SEQ ID NO: 1912 - protein, 7 aa, Prunus cerasus
  REGION 1..7: note = "Antioxidant, Antihypertensive"; --NA--; Peptide extracts obtained by the digestion of the cherry seed protein isolate with Alcalase and Th
LLPGANH

SEQ ID NO: 1913 - protein, 5 aa, Prunus cerasus
  REGION 1..5: note = "Antioxidant, Antihypertensive"; --NA--; Peptide extracts obtained by the digestion of the cherry seed protein isolate with Alcalase and Th
LYSPH

SEQ ID NO: 1914 - protein, 5 aa, Prunus cerasus
  REGION 1..5: note = "Antioxidant, Antihypertensive"; --NA--; Peptide extracts obtained by the digestion of the cherry seed protein isolate with Alcalase and Th
LYTPH

SEQ ID NO: 1915 - protein, 8 aa, Prunus cerasus
  REGION 1..8: note = "Antioxidant, Antihypertensive"; --NA--; Peptide extracts obtained by the digestion of the cherry seed protein isolate with Alcalase and Th
NGDPLLDQ

SEQ ID NO: 1916 - protein, 6 aa, Prunus cerasus
  REGION 1..6: note = "Antioxidant, Antihypertensive"; --NA--; Peptide extracts obtained by the digestion of the cherry seed protein isolate with Alcalase and Th
NLGDPS

SEQ ID NO: 1917 - protein, 6 aa, Prunus cerasus
  REGION 1..6: note = "Antioxidant, Antihypertensive"; --NA--; Peptide extracts obtained by the digestion of the cherry seed protein isolate with Alcalase and Th
NLGNPE

SEQ ID NO: 1918 - protein, 5 aa, Prunus cerasus
  REGION 1..5: note = "Antioxidant, Antihypertensive"; --NA--; Peptide extracts obtained by the digestion of the cherry seed protein isolate with Alcalase and Th
NLPLL

SEQ ID NO: 1919 - protein, 5 aa, Cannabis sativa
  REGION 1..5: note = "Antioxidant, Antihypertensive"; --NA--; Uses as active antioxidant peptides having DPPH scavenging and metal chelation activity It also sh
PSLPA

SEQ ID NO: 1920 - protein, 10 aa, Prunus cerasus
  REGION 1..10: note = "Antioxidant, Antihypertensive"; --NA--; Peptide extracts obtained by the digestion of the cherry seed protein isolate with Alcalase and Th
QLNEPDNRLQ

SEQ ID NO: 1921 - protein, 10 aa, Prunus cerasus
  REGION 1..10: note = "Antioxidant, Antihypertensive"; --NA--; Peptide extracts obtained by the digestion of the cherry seed protein isolate with Alcalase and Th
QLPEPDNRLQ

SEQ ID NO: 1922 - protein, 5 aa, Prunus cerasus
  REGION 1..5: note = "Antioxidant, Antihypertensive"; --NA--; Peptide extracts obtained by the digestion of the cherry seed protein isolate with Alcalase and Th
QLPLL

SEQ ID NO: 1923 - protein, 5 aa, Prunus cerasus
  REGION 1..5: note = "Antioxidant, Antihypertensive"; --NA--; Peptide extracts obtained by the digestion of the cherry seed protein isolate with Alcalase and Th
TELAL

SEQ ID NO: 1924 - protein, 8 aa, Prunus cerasus
  REGION 1..8: note = "Antioxidant, Antihypertensive"; --NA--; Peptide extracts obtained by the digestion of the cherry seed protein isolate with Alcalase and Th
VTYDYYKN

SEQ ID NO: 1925 - protein, 7 aa, Prunus cerasus
  REGION 1..7: note = "Antioxidant, Antihypertensive"; --NA--; Peptide extracts obtained by the digestion of the cherry seed protein isolate with Alcalase and Th
YGPQQQE

SEQ ID NO: 1926 - protein, 6 aa, Prunus cerasus
  REGION 1..6: note = Prunus cerasus, Olea europaea; "Antioxidant, Antihypertensive, ACE-inhibitor"; --NA--; Peptide extracts obtained by the digestion of the cherry seed protein isolate with Alcalase and Th
LTPTSN

SEQ ID NO: 1927 - protein, 6 aa, Setaria italica
  REGION 1..6: note = "Antioxidant, Antimicrobial"; --NA--; "Shows significant scavenging activities for 1,1-diphenyl-2-picrylhydrazyl (DPPH), and superoxide a"
LGTFQN

SEQ ID NO: 1928 - protein, 6 aa, Setaria italica
  REGION 1..6: note = "Antioxidant, Antimicrobial"; --NA--; "Shows significant scavenging activities for 1,1-diphenyl-2-picrylhydrazyl (DPPH), and superoxide a"
LHALLL

SEQ ID NO: 1929 - protein, 6 aa, Setaria italica
  REGION 1..6: note = "Antioxidant, Antimicrobial"; --NA--; "Shows significant scavenging activities for 1,1-diphenyl-2-picrylhydrazyl (DPPH), and superoxide a"
SGYYMH

SEQ ID NO: 1930 - protein, 25 aa, Triticum aestivum
  REGION 1..25: note = "Antioxidant, Celiac-toxic"; --NA--; Shows significant antioxidant activity i.e. able to scavenge superoxide anion and hydroxyl radical
LGQQQPFPPQQPYPQPQPFPSQQPY

SEQ ID NO: 1931 - protein, 29 aa, Viola betonicifolia
  REGION 1..29: note = Antiparasitic; Cyclotide; --NA--
TPCGESCVYIPCISGVIGCSCTDKVCYLN

SEQ ID NO: 1932 - protein, 8 aa, Jatropha pohliana
  REGION 1..8: note = Antiparasitic; Orbitide; Shown to possess antiproliferative activity of pohlianins.
GGTIIFGF

SEQ ID NO: 1933 - protein, 7 aa, Jatropha pohliana
  REGION 1..7: note = Antiparasitic; Orbitide; Shown to possess antiproliferative activity of pohlianins.
PLGLLLY

SEQ ID NO: 1934 - protein, 7 aa, Jatropha pohliana
  REGION 1..7: note = Antiparasitic; Orbitide; Shown to possess antiproliferative activity of pohlianins.
PLGVLLY

SEQ ID NO: 1935 - protein, 7 aa, Stellaria yunnanensis
  REGION 1..7: note = Antiproliferative; Orbitide; Cell growth inhibitory activity
PFPGYGG

SEQ ID NO: 1936 - protein, 7 aa, Stellaria yunnanensis
  REGION 1..7: note = Antiproliferative; Orbitide; Cell growth inhibitory activity
PGIGFYS

SEQ ID NO: 1937 - protein, 6 aa, Arachis hypogaea
  REGION 1..6: note = Antithrombotic; --NA--; Shows antithrombotic activity and prevent the proteolysis of the fibrinogen or prevent the polymer
CFNEYE

SEQ ID NO: 1938 - protein, 7 aa, Arachis hypogaea
  REGION 1..7: note = Antithrombotic; --NA--; Shows antithrombotic activity and prevent the proteolysis of the fibrinogen or prevent the polymer
GNHEAGE

SEQ ID NO: 1939 - protein, 5 aa, Arachis hypogaea
  REGION 1..5: note = Antithrombotic; --NA--; Shows antithrombotic activity and prevent the proteolysis of the fibrinogen or prevent the polymer
SWAQL

SEQ ID NO: 1940 - protein, 31 aa, Viola yedoensis
  REGION 1..31: note = Antiviral; Cyclotide; --NA--
CGESCVFIPCITTVLGCSCSIKVCYKNGSIP

SEQ ID NO: 1941 - protein, 30 aa, Chassalia parvifolia
  REGION 1..30: note = Antiviral; Cyclotide; --NA--
CGESCVFIPCITSVAGCSCKSKVCYRNGIP

SEQ ID NO: 1942 - protein, 30 aa, Viola philippica
  REGION 1..30: note = Antiviral; Cyclotide; --NA--
GIPCAESCVWIPCTVTAIVGCSCSDKVCYN

SEQ ID NO: 1943 - protein, 98 aa, Unidentified
  REGION 1..98: note = Griffithsia; Antiviral; --NA--; --NA--
SLTHRKFGGSGGSPFSGLSSIAVRSGSYLDAIIIDGVHHGGSGGNLSPTFTFGSGEYISNMTIRSGDYIDNISFETNMGRRFGPYGGSGGSANTLSNV

SEQ ID NO: 1944 - protein, 46 aa, Dorstenia contrajerva
  REGION 1..46: note = Antiviral; --NA--; inhibits the binding of CV-N to gp41 and shows anti-HIV activity in a whole cell assay.
ERDDHRCGPDYGNPSCSGDRCCSIYNWCGGGSSYCSGGSCRYQCWY

SEQ ID NO: 1945 - protein, 50 aa, Treculia obovoidea
  REGION 1..50: note = Antiviral; --NA--; inhibits the binding of CV-N to gp41 and shows anti-HIV activity in a whole cell assay.
PGCEERPDHQCGPDYGNPGCGAGRCCSIHGWCGSSADYCSGTSCQYQCSC

SEQ ID NO: 1946 - protein, 10 aa, Gymnocladus chinensis
  REGION 1..10: note = "Antiviral, Anticancer, Antifungal"; Gymnin; Target site: lipid bilayer
KTCENLADDY

SEQ ID NO: 1947 - protein, 10 aa, Phaseolus vulgaris
  REGION 1..10: note = "Antiviral, Anticancer, Antifungal"; Antifungal Lectin PVAP; --NA--
SNDIYFNFQR

SEQ ID NO: 1948 - protein, 10 aa, Phaseolus coccineus
  REGION 1..10: note = "Antiviral, Anticancer, Antifungal, Hemolytic, Antiproliferative, HIV-1-reverse-transcriptase-inhib"; Defensin; Target site: lipid bilayer; Mouse splenocytes; It has antifungal activity on a number of fungal sp
KQTENLADTY

SEQ ID NO: 1949 - protein, 29 aa, Viola tricolor
  REGION 1..29: note = Viola tricolor, Viola arvensis, Viola baoshanensis, Viola yedoensis, Viola tianshanica, Viola abys; "Antiviral, Anticancer, Nematocide, Anti-HIV"; Cyclotide; "participates in a plant defense mechanism, Target site: lipid bilayer; shows 50% Hemolysis against"
GLPICGETCVGGTCNTPGCSCSWPVCTRN

SEQ ID NO: 1950 - protein, 75 aa, Phaseolus vulgaris
  REGION 1..75: note = "Antiviral, Antifungal"; Defensin; Target site: lipid bilayer
MEKKSLAGLCFLFLVLFVAQEVVLQTEAKTCENLADTYKGPCFTTGSCDDHCKNKEHLRSGRCRDDFRCWCTKNC

SEQ ID NO: 1951 - protein, 31 aa, Chassalia parvifolia
  REGION 1..31: note = "Antiviral, Anti-HIV"; Cyclotide; --NA--
KIPCGESCVWIPCVTSIFNCKCKENKVCYHD

SEQ ID NO: 1952 - protein, 29 aa, Chassalia parvifolia
  REGION 1..29: note = "Antiviral, Anti-HIV"; Cyclotide; --NA--
KVCYRAIPCGESCVWIPCISAAIGCSCKN

SEQ ID NO: 1953 - protein, 37 aa, Palicourea condensata
  REGION 1..37: note = "Antiviral, Anti-HIV"; Cyclotide; "Target site: lipid bilayer, Palicourein shown to have anti-HIV properties."
GDPTFCGETCRVIPVCTYSAALGCTCDDRSDGLCKRN

SEQ ID NO: 1954 - protein, 30 aa, Chassalia parvifolia
  REGION 1..30: note = "Antiviral, Anti-HIV"; Cyclotide; Target site: lipid bilayer; Circulins E inhibited the cytopathic effects of in vitro HIV-1 infecti
KIPCGESCVWIPCLTSVFNCKCENKVCYHD

SEQ ID NO: 1955 - protein, 30 aa, Chassalia parvifolia
  REGION 1..30: note = "Antiviral, Anti-HIV"; Cyclotide; Circulins C inhibited the cytopathic effects of in vitro HIV-1 infection.
GIPCGESCVFIPCITSVAGCSCKSKVCYRN

SEQ ID NO: 1956 - protein, 30 aa, Viola hederacea
  REGION 1..30: note = "Antiviral, Anti-HIV, Anticancer"; Cyclotide; "Shown to possess anti-HIV activity; Participate in the innate immune response of plants, therapeut"
GLPVCGETCFTGTCYTNGCTCDPWPVCTRN

SEQ ID NO: 1957 - protein, 30 aa, Viola yedoensis
  REGION 1..30: note = "Antiviral, Anti-HIV, Nematocide, Hemolytic, Antimicrobial"; Cyclotide; "Shown to possess nematocidal, hemolytic and anti-HIV activity; Participate in the innate immune re"
GVPCGESCVFIPCITGVIGCSCSSNVCYLN

SEQ ID NO: 1958 - protein, 31 aa, Viola hederacea
  REGION 1..31: note = "Antiviral, Antimicrobial"; Cyclotide; "participates in a plant defense mechanism, possesses anti-human immunodeficiency virus activity."
CGESCAMISFCFTEVIGCSCKNKVCYLNSIS

SEQ ID NO: 1959 - protein, 33 aa, Viola philippica
  REGION 1..33: note = Viola philippica, Viola yedoensis; "Antiviral, Insecticidal, Anti-HIV"; Cyclotide; Shown to possess insecticidal and anti-HIV activity.
GGTIFDCGESCFLGTCYTAGCSCGNWGLCYGTN

SEQ ID NO: 1960 - protein, 6 aa, Glycine max
  REGION 1..6: note = Bile-acid-binding-inhibitor; --NA--; inhibits cholesterol absorption
VAWWMY

SEQ ID NO: 1961 - protein, 10 aa, Leonurus japonicus
  REGION 1..10: note = Cyclooxygenase-inhibitor; Orbitide; Shown to possess cyclooxygenase inhibitory activity.
PPPYFQTPIS

SEQ ID NO: 1962 - protein, 30 aa, Viola philippica
  REGION 1..30: note = Cytotoxic; Cyclotide; Shown to possess highly cytotoxic activity against cancer cell lines.
GIPCAESCVWIPCTVTAIVGCSCSWGVCYN

SEQ ID NO: 1963 - protein, 31 aa, Psychotria leptothyrsa
  REGION 1..31: note = Cytotoxic; Cyclotide; Shows potent cytotoxic activity in cancer cells.
GVIPCGESCVFIPCITAAVGCSCKNKVCYRD

SEQ ID NO: 1964 - protein, 30 aa, Viola philippica
  REGION 1..30: note = Cytotoxic; Cyclotide; Shown to possess highly cytotoxic activity against cancer cell lines.
GVPCGESCVYIPCITSVIGCSCSSKVCYIN

SEQ ID NO: 1965 - protein, 29 aa, Pombalia calceolaria
  REGION 1..29: note = Cytotoxic; Cyclotide; Shows cytotoxocity against triple-negative breast cancer cell line.
GIPCAESCVFIPCVTAILGCSCKDRVCYN

SEQ ID NO: 1966 - protein, 29 aa, Melicytus chathamicus
  REGION 1..29: note = Cytotoxic; Cyclotide; Shows cytotoxocity against cancer cell lines and low toxicity against red blood cells.
GIPICGETCTIGTCNTPGCTCSWPVCTRD

SEQ ID NO: 1967 - protein, 29 aa, Melicytus latifolius
  REGION 1..29: note = Cytotoxic; Cyclotide; Shows cytotoxocity against cancer cell lines and low toxicity against red blood cells.
GIPTCGETCFKGKCYTPGCSCSYPICKKD

SEQ ID NO: 1968 - protein, 7 aa, Vaccaria hispanica
  REGION 1..7: note = Cytotoxic; Orbitide; Shows cytotoxocity against cancer cell line.
GLHFAFP

SEQ ID NO: 1969 - protein, 30 aa, Pombalia calceolaria
  REGION 1..30: note = Cytotoxic; Cyclotide; Shows cytotoxocity against triple-negative breast cancer cell line.
GLPCAESCVFIPCTITAILGCSCRDRVCYD

SEQ ID NO: 1970 - protein, 29 aa, Viola abyssinica
  REGION 1..29: note = Cytotoxic; Cyclotide; Shows potent cytotoxic activity in cancer cells.
GLPVCGETCAGGTCNTPGCSCTWPICTRN

SEQ ID NO: 1971 - protein, 29 aa, Viola philippica
  REGION 1..29: note = Cytotoxic; Cyclotide; Shown to possess highly cytotoxic activity against cancer cell lines.
GLPVCGETCTIGTCYTAGCTCSWPICTRN

SEQ ID NO: 1972 - protein, 30 aa, Melicytus latifolius
  REGION 1..30: note = Cytotoxic; Cyclotide; Shows cytotoxocity against cancer cell lines and low toxicity against red blood cells.
GSAIACGESCFKFKCYTPGCSCSYPICKKD

SEQ ID NO: 1973 - protein, 31 aa, Melicytus chathamicus
  REGION 1..31: note = Cytotoxic; Cyclotide; Shows cytoxocity against cancer cell lines and low toxicity against red blood cells.
GSIPCGESCVYIPCISSLLGCSCKSKVCYKD

SEQ ID NO: 1974 - protein, 31 aa, Melicytus chathamicus
  REGION 1..31: note = Cytotoxic; Cyclotide; Shows cytotoxocity against cancer cell lines and low toxicity against red blood cells.
GVIPCGESCVFIPCISSVVGCTCKNKVCYRD

SEQ ID NO: 1975 - protein, 31 aa, Melicytus chathamicus
  REGION 1..31: note = Cytotoxic; Cyclotide; Shows cytotoxocity against cancer cell lines and low toxicity against red blood cells.
GVIPCGESCVFIPCISSVVGCTCKNKVCYRN

SEQ ID NO: 1976 - protein, 7 aa, Vaccaria hispanica
  REGION 1..7: note = Cytotoxic; Orbitide; Shows cytotoxocity against cancer cell line.
GWVPLWP

SEQ ID NO: 1977 - protein, 8 aa, Jatropha ribifolia
  REGION 1..8: note = Cytotoxic; Orbitide; Shown to possess cytotoxic activity.
ILGSIILG

SEQ ID NO: 1978 - protein, 5 aa, Dianthus superbus
  REGION 1..5: note = Cytotoxic; Orbitide; Shown to possess cytotoxic activity.
PGFVF

SEQ ID NO: 1979 - protein, 6 aa, Dianthus superbus
  REGION 1..6: note = Cytotoxic; Orbitide; Shown to possess cytotoxic activity.
PGIVYF

SEQ ID NO: 1980 - protein, 6 aa, Dianthus superbus
  REGION 1..6: note = Cytotoxic; Orbitide; Shown to possess cytotoxic activity.
PGVFSI

SEQ ID NO: 1981 - protein, 7 aa, Dianthus superbus
  REGION 1..7: note = Cytotoxic; Orbitide; Shown to possess cytotoxic activity.
PPIFGSL

SEQ ID NO: 1982 - protein, 8 aa, Annona cherimola
  REGION 1..8: note = Cytotoxic; Orbitide; Shows cytotoxocity against cancer cell line.
PQTGMLPI

SEQ ID NO: 1983 - protein, 8 aa, Annona cherimola
  REGION 1..8: note = Cytotoxic; Orbitide; Shows cytotoxocity against cancer cell line.
PQTGMLPI

SEQ ID NO: 1984 - protein, 31 aa, Psychotria leptothyrsa
  REGION 1..31: note = Cytotoxic; Cyclotide; Shows potent cytotoxic activity in cancer cells.
GIPCGESCVFIPCTVTALLGCSCQNKVCYRD

SEQ ID NO: 1985 - protein, 28 aa, Psychotria leptothyrsa
  REGION 1..28: note = Cytotoxic; Cyclotide; Shows potent cytotoxic activity in cancer cells.
GIPCGETCVAFGCWIPGCSCKDKLCYYD

SEQ ID NO: 1986 - protein, 30 aa, Viola philippica
  REGION 1..30: note = Cytotoxic; Cyclotide; shows cytotoxic activities against the cancer cell lines MM96L
CAESCVWIPCTVTAIVGCSCSWGVCYNGIP

SEQ ID NO: 1987 - protein, 31 aa, Viola philippica
  REGION 1..31: note = Cytotoxic; Cyclotide; shows cytotoxic activities against the cancer cell lines MM96L
CGESCVFIPCISAIIGCSCSNKVCYKNGSIP

SEQ ID NO: 1988 - protein, 31 aa, Viola philippica
  REGION 1..31: note = Cytotoxic; Cyclotide; shows cytotoxic activities against the cancer cell lines MM96L
CGESCVFIPCISAIIGCSCSSKVCYKNGSIP

SEQ ID NO: 1989 - protein, 31 aa, Viola philippica
  REGION 1..31: note = Cytotoxic; Cyclotide; shows cytotoxic activities against the cancer cell lines MM96L
CGESCVFIPCISAVIGCSCSNKVCYKNGSIP

SEQ ID NO: 1990 - protein, 31 aa, Viola philippica
  REGION 1..31: note = Cytotoxic; Cyclotide; shows cytotoxic activities against the cancer cell lines MM96L
CGESCVFIPCISSVIGCACKSKVCYKNGSIP

SEQ ID NO: 1991 - protein, 30 aa, Viola philippica
  REGION 1..30: note = Cytotoxic; Cyclotide; shows cytotoxic activities against the cancer cell lines MM96L
CGESCVFIPCISSVIGCSCSSKVCYRNGIP

SEQ ID NO: 1992 - protein, 30 aa, Viola philippica
  REGION 1..30: note = Cytotoxic; Cyclotide; shows cytotoxic activities against the cancer cell lines MM96L
CGESCVFIPCLTSAIGCSCKSKVCYRNGIP

SEQ ID NO: 1993 - protein, 30 aa, Viola philippica
  REGION 1..30: note = Cytotoxic; Cyclotide; shows cytotoxic activities against the cancer cell lines MM96L
CGESCVYIPCITSVIGCSCSSKVCYINGVP

SEQ ID NO: 1994 - protein, 29 aa, Viola philippica
  REGION 1..29: note = Cytotoxic; Cyclotide; shows cytotoxic activities against the cancer cell lines MM96L
CGETCTIGTCYTAGCTCSWPICTRNGLPV

SEQ ID NO: 1995 - protein, 29 aa, Viola philippica
  REGION 1..29: note = Cytotoxic; Cyclotide; shows cytotoxic activities against the cancer cell lines MM96L
CGETCVGGTCNTPGCACSWPVCTRNGLPV

SEQ ID NO: 1996 - protein, 29 aa, Viola philippica
  REGION 1..29: note = Cytotoxic; Cyclotide; shows cytotoxic activities against the cancer cell lines MM96L
CGETCVGGTCNTPGCGCSWPVCTRNGLPV

SEQ ID NO: 1997 - protein, 31 aa, Psychotria leptothyrsa
  REGION 1..31: note = Cytotoxic; Cyclotide; --NA--
GVIPCGESCVFIPCITAAVGCSCKNKVCYKN

SEQ ID NO: 1998 - protein, 8 aa, Psammosilene tunicoides
  REGION 1..8: note = Cytotoxic; --NA--; "is toxic against four human cancer cell lines, A549, LOVO, HL-60, and L-929"
PGFVPFTI

SEQ ID NO: 1999 - protein, 7 aa, Annona cherimola
  REGION 1..7: note = Cytotoxic; Cyclic Peptide; Cherimolacyclopeptide C exhibited significant in vitro cytotoxic activity against KB cells
PGAAWIP

SEQ ID NO: 2000 - protein, 30 aa, Melicytus chathamicus
  REGION 1..30: note = "Cytotoxic, Antibacterial"; Cyclotide; "Shows cytotoxocity against cancer cell lines and low toxicity against red blood cells, Target site"
GVIPCGESCVFIPCINKKKCSCKNKVCYRD

SEQ ID NO: 2001 - protein, 29 aa, Melicytus latifolius
  REGION 1..29: note = "Cytotoxic, Antibacterial, Anticancer"; Cyclotide; "Shows cytotoxocity against cancer cell lines and low toxicity against red blood cells, Target site"
GKPICGETCFKGKCYTPGCTCSYPICKKD

SEQ ID NO: 2002 - protein, 47 aa, Triticum aestivum
  REGION 1..47: note = "Cytotoxic, Antibacterial, Protein-synthesis-inhibitor"; Thionin; Target site- Lipid Bilayer; inhibits protein synthesis in eukaryotic cell-free system; Shows cytot
KVCRQRSAGFKGPCVSDKNCAQVCLQEGWGGGNCDGPFRRCKCIRQC

SEQ ID NO: 2003 - protein, 29 aa, Viola arvensis
  REGION 1..29: note = Viola arvensis, Viola tricolor; "Cytotoxic, Anticancer, Enzymatic-degradation, Antimicrobial"; Cyclic Peptide; participates in a plant defense mechanism.; Shows significant cytotoxic activity; Resist enzymatic
GVPICGETCTLGTCYTAGCSCSWPVCTRN

SEQ ID NO: 2004 - protein, 30 aa, Viola biflora
  REGION 1..30: note = "Cytotoxic, Antimicrobial"; Cyclotide; "Showed significant potency in cytotoxicity, participates in a plant defense mechanism."
GIPCGESCVWIPCLTSAVGCPCKSKVCYRN

SEQ ID NO: 2005 - protein, 30 aa, Viola biflora
  REGION 1..30: note = "Cytotoxic, Antimicrobial"; Cyclotide; "Showed significant potency in cytotoxicity, participates in a plant defense mechanism."
GIPCGESCVWIPCLTSTVGCSCKSKVCYRN

SEQ ID NO: 2006 - protein, 29 aa, Viola tricolor
  REGION 1..29: note = Viola tricolor, Viola biflora; "Cytotoxic, Antimicrobial"; Cyclotide; "Showed significant potency in cytotoxicity, participates in a plant defense mechanism."
GLPVCGETCAFGSCYTPGCSCSWPVCTRN

SEQ ID NO: 2007 - protein, 29 aa, Viola biflora
  REGION 1..29: note = "Cytotoxic, Antimicrobial"; Cyclotide; "Showed significant potency in cytotoxicity, participates in a plant defense mechanism."
GLPVCGETCFGGTCNTPGCSCSYPICTRN

SEQ ID NO: 2008 - protein, 29 aa, Viola biflora
  REGION 1..29: note = Viola biflora, Palicourea tetragona; "Cytotoxic, Antimicrobial"; Cyclotide; "Showed significant potency in cytotoxicity, participates in a plant defense mechanism."
GLPVCGETCFGGTCNTPGCTCSYPICTRN

SEQ ID NO: 2009 - protein, 31 aa, Viola biflora
  REGION 1..31: note = "Cytotoxic, Antimicrobial"; Cyclotide; "Showed significant potency in cytotoxicity, participates in a plant defense mechanism."
GTFPCGESCVWIPCISKVIGCACKSKVCYKN

SEQ ID NO: 2010 - protein, 29 aa, Viola tricolor
  REGION 1..29: note = Viola tricolor, Viola abyssinica; "Cytotoxic, Antimicrobial"; Cyclotide; "Shows potent cytotoxic activity in cancer cells., participates in a plant defense mechanism."
GLPVCGETCAGGRCNTPGCSCSWPVCTRN

SEQ ID NO: 2011 - protein, 30 aa, Viola abyssinica
  REGION 1..30: note = Viola abyssinica, Viola tricolor; "Cytotoxic, Antimicrobial"; Cyclotide; "Shows potent cytotoxic activity in cancer cells , participates in a plant defense mechanism."
GLPVCGETCFGGTCNTPGCSCDPWPVCTRN

SEQ ID NO: 2012 - protein, 6 aa, Stellaria dichotoma
  REGION 1..6: note = "Cytotoxic, Cyclooxygenase-inhibitor"; Orbitide; Shown to possess cytotoxic and cyclooxygenase inhibitory activity.
GTFLYA

SEQ ID NO: 2013 - protein, 6 aa, Stellaria dichotoma
  REGION 1..6: note = "Cytotoxic, Cyclooxygenase-inhibitor"; Orbitide; Shown to possess cytotoxic and cyclooxygenase inhibitory activity.
GTFLYT

SEQ ID NO: 2014 - protein, 6 aa, Stellaria dichotoma
  REGION 1..6: note = "Cytotoxic, Cyclooxygenase-inhibitor"; Orbitide; Shown to possess cytotoxic and cyclooxygenase inhibitory activity.
GTFLYV

SEQ ID NO: 2015 - protein, 6 aa, Stellaria dichotoma
  REGION 1..6: note = "Cytotoxic, Cyclooxygenase-inhibitor"; Orbitide; Shown to possess cytotoxic and cyclo oxygenase inhibitory activity.
GVGFYI

SEQ ID NO: 2016 - protein, 5 aa, Stellaria dichotoma
  REGION 1..5: note = "Cytotoxic, Cyclooxygenase-inhibitor"; Orbitide; Shown to possess cvtotoxic and cvclooxvgenase inhibitory activity.
GYAFA

SEQ ID NO: 2017 - protein, 8 aa, Stellaria dichotoma
  REGION 1..8: note = "Cytotoxic, Cyclooxygenase-inhibitor"; Orbitide; Shown to possess cvtotoxic and cvclooxvgenase inhibitory activity.
PTFYPLIA

SEQ ID NO: 2018 - protein, 8 aa, Stellaria dichotoma
  REGION 1..8: note = "Cytotoxic, Cyclooxygenase-inhibitor"; Orbitide; Shown to possess cvtotoxic and cvclooxvgenase inhibitory activity.
PTFYPLIV

SEQ ID NO: 2019 - protein, 29 aa, Viola tricolor
  REGION 1..29: note = "Cytotoxic, Enzymatic-degradation, Antimicrobial, Anticancer"; Cyclotide; "Shown to possess enzymatic degradation and highly cytotoxic activity against cancer cell lines., p"
GYPICGESCVGGTCNTPGCSCSWPVCTTN

SEQ ID NO: 2020 - protein, 30 aa, Viola tricolor
  REGION 1..30: note = Viola tricolor, Melicytus ramiflorus, Viola philippica; "Cytotoxic, Enzymatic-degradation, Antimicrobial, Anticancer"; Cyclotide; "Shown to possess cytotoxic and enzymatic degradation activity, participates in a plant defense mec"
GIPCGESCVFIPCLTSAIGCSCKSKVCYRN

SEQ ID NO: 2021 - protein, 29 aa, Viola arvensis
  REGION 1..29: note = Viola arvensis, Viola hederacea, Viola biflora, Viola odorata, Viola tricolor; "Cytotoxic, Nematocide, Hemolytic, Anti-HIV, Anticancer, Antimicrobial"; Cyclic Peptide; "Shows significant cytotoxic activity, The Kalata S showed significant activity in inhibiting devel"
GLPVCGETCVGGTCNTPGCSCSWPVCTRN

SEQ ID NO: 2022 - protein, 12 aa, Glycine max
  REGION 1..12: note = Defense-activator; --NA--; causes a pH increase of soybean suspension-cultured cell media within 10 min at low nanomolar conc
NTPPRRAKSRPH

SEQ ID NO: 2023 - protein, 45 aa, Vigna unguiculata
  REGION 1..45: note = Defense-activator; Thionin; It is able to inhibit insect-pest alpha-amylase and has potential application in the development o
KTCMTKKEGWGRCLIDTTCAHSCRKYGYMGKCQGITRRCYCLLNC

SEQ ID NO: 2024 - protein, 46 aa, Pisum sativum
  REGION 1..46: note = Defense-activator; Thionin; It is able to inhibit insect-pest alpha-amylase and has potential application in the development o
RVCESQSHGFKGACTGDHNCALVCRNEGFSGNCRGFRRRCFCRLKC

SEQ ID NO: 2025 - protein, 18 aa, Lycopersicon esculentum
  REGION 1..18: note = Defense-gene-activator; --NA--; "is a potent activator of defense gene transcription, including proteinase inhibitor; activates a l"
AVQSKPPSKRDPPKMQTD

SEQ ID NO: 2026 - protein, 15 aa, Lycopersicon esculentum
  REGION 1..15: note = Defense-gene-activator; --NA--; "is a potent activator of defense gene transcription, including proteinase inhibitor; activates a l"
GRHDSVLPPPSPKTD

SEQ ID NO: 2027 - protein, 20 aa, Lycopersicon esculentum
  REGION 1..20: note = Defense-gene-activator; --NA--; "is a potent activator of defense gene transcription, including proteinase inhibitor; activates a l"
GRHDYVASPPPPKPQDEQRQ

SEQ ID NO: 2028 - protein, 18 aa, Nicotiana tabacum
  REGION 1..18: note = Defense-gene-activator; --NA--; "is a potent activator of defense gene transcription, including proteinase inhibitor;"
NRKPLSPPSPKPADGQRP

SEQ ID NO: 2029 - protein, 18 aa, Nicotiana tabacum
  REGION 1..18: note = Defense-gene-activator; --NA--; "is a potent activator of defense gene transcription, including proteinase inhibitor;"
RGANLPPPSPASSPPSKE

SEQ ID NO: 2030 - protein, 18 aa, Lycopersicon esculentum
  REGION 1..18: note = Defense-gene-activator; --NA--; "is a potent activator of defense gene transcription, including proteinase inhibitor; activates a l"
RTPYKTPPPPTSSSPTHQ

SEQ ID NO: 2031 - protein, 15 aa, Solanum lycopersicum
  REGION 1..15: note = Defensive-proteinase-inhibitor; Systemin; This peptide is helpful in the wound signaling of tomato plants that activates defense against her
GRHDSVLPXXSXKTD

SEQ ID NO: 2032 - protein, 15 aa, Solanum lycopersicum
  REGION 1..15: note = Defensive-proteinase-inhibitor; Systemin; This peptide is helpful in the wound signaling of tomato plants that activates defense against her
GRHDYVASXXXXKPQ

SEQ ID NO: 2033 - protein, 18 aa, Lycopersicon esculentum
  REGION 1..18: note = Defensive-proteinase-inhibitor; Systemin; This peptide is helpful in the wound signaling of tomato plants that activates defense against her
RTXYKTXXXXTSSSXTHQ

SEQ ID NO: 2034 - protein, 6 aa, Dianthus superbus
  REGION 1..6: note = "Diuretic, Anti-inflammatory"; Orbitide; "Diuretic and anti-inflammatory agent in the treatment of urinary infections, carbuncles and carcin"
PIFFPG

SEQ ID NO: 2035 - protein, 6 aa, Dianthus superbus
  REGION 1..6: note = "Diuretic, Anti-inflammatory"; Orbitide; "Diuretic and anti-inflammatory agent in the treatment of urinary infections, carbuncles and carcin"
AYNFGL

SEQ ID NO: 2036 - protein, 30 aa, Gloeospermum blakeanum
  REGION 1..30: note = Enzymatic-degradation; Cyclotide; Shows significant enzymatic degradation activity.
GIPCGESCVFIPCITAAIGCSCKTKVCYRN

SEQ ID NO: 2037 - protein, 30 aa, Gloeospermum blakeanum
  REGION 1..30: note = Enzymatic-degradation; Cyclotide; Shows significant enzymatic degradation activity.
APCGESCVYIPCLLTAPIGCSCSNIVCYRN

SEQ ID NO: 2038 - protein, 30 aa, Viola odorata
  REGION 1..30: note = Enzymatic-degradation; Cyclotide; Shows significant enzymatic degradation activity.
GAPVCGETCFGGTCNTPGCTCDPWPVCTND

SEQ ID NO: 2039 - protein, 31 aa, Gloeospermum pauciflorum
  REGION 1..31: note = Enzymatic-degradation; Cyclotide; Shows significant enzymatic degradation activity.
GDIPLCGETCFEGGNCRIPGCTCVWPFCSKN

SEQ ID NO: 2040 - protein, 32 aa, Gloeospermum pauciflorum
  REGION 1..32: note = Enzymatic-degradation; Cyclotide; Shows significant enzymatic degradation activity.
GGSIPCIETCVWTGCFLVPGCSCKSDKKCYLN

SEQ ID NO: 2041 - protein, 32 aa, Gloeospermum pauciflorum
  REGION 1..32: note = Enzymatic-degradation; Cyclotide; Shows significant enzymatic degradation activity.
GGSVPCIETCVWTGCFLVPGCSCKSDKKCYLN

SEQ ID NO: 2042 - protein, 30 aa, Gloeospermum pauciflorum
  REGION 1..30: note = Enzymatic-degradation; Cyclotide; Shows significant enzymatic degradation activity.
GIPCAESCVWIPCTVTKMLGCSCKDKVCYN

SEQ ID NO: 2043 - protein, 30 aa, Viola odorata
  REGION 1..30: note = Enzymatic-degradation; Cyclotide; Shows significant enzymatic degradation activity.
GIPCGESCVWIPCISGAIGCSCKSKVCYKN

SEQ ID NO: 2044 - protein, 30 aa, Viola odorata
  REGION 1..30: note = Enzymatic-degradation; Cyclotide; Shows significant enzymatic degradation activity.
GIPCGESCVWIPCISSAIGCSCKNKVCFKN

SEQ ID NO: 2045 - protein, 30 aa, Gloeospermum blakeanum
  REGION 1..30: note = Enzymatic-degradation; Cyclotide; Shows significant enzymatic degradation activity.
GIPCGETCVFMPCISGPMGCSCKHMVCYRN

SEQ ID NO: 2046 - protein, 30 aa, Viola odorata
  REGION 1..30: note = Enzymatic-degradation; Cyclotide; Shows significant enzymatic degradation activity.
GLPTCGETCFGGTCNTPGCTCDPFPVCTHD

SEQ ID NO: 2047 - protein, 29 aa, Viola odorata
  REGION 1..29: note = Enzymatic-degradation; Cyclotide; Shows significant enzymatic degradation activity.
GLPVCGETCVGGTCNTEYCTCSWPVCTRD

SEQ ID NO: 2048 - protein, 29 aa, Viola odorata
  REGION 1..29: note = Enzymatic-degradation; Cyclotide; Shows significant enzymatic degradation activity.
GLPVCGETCVGGTCNTPGCSCSIPVCTRN

SEQ ID NO: 2049 - protein, 29 aa, Viola odorata
  REGION 1..29: note = Enzymatic-degradation; Cyclotide; Shows significant enzymatic degradation activity.
GLPVCGETCVGGTCNTPYCFCSWPVCTRD

SEQ ID NO: 2050 - protein, 29 aa, Viola odorata
  REGION 1..29: note = Enzymatic-degradation; Cyclotide; Shows significant enzymatic degradation activity.
GLPVCGETCVGGTCNTPYCTCSWPVCTRD

SEQ ID NO: 2051 - protein, 30 aa, Gloeospermum blakeanum
  REGION 1..30: note = Enzymatic-degradation; Cyclotide; Shows significant enzymatic degradation activity.
GSAFGCGETCVKGKCNTPGCVCSWPVCKKN

SEQ ID NO: 2052 - protein, 31 aa, Gloeospermum blakeanum
  REGION 1..31: note = Enzymatic-degradation; Cyclotide; Shows significant enzymatic degradation activity.
GSFPCGESCVFIPCISAIAGCSCKNKVCYKN

SEQ ID NO: 2053 - protein, 31 aa, Viola odorata
  REGION 1..31: note = Enzymatic-degradation; Cyclotide; Shows significant enzymatic degradation activity.
GSIPACGESCFKGWCYTPGCSCSKYPLCAKD

SEQ ID NO: 2054 - protein, 31 aa, Viola odorata
  REGION 1..31: note = Enzymatic-degradation; Cyclotide; Shows significant enzymatic degradation activity.
GSIPACGESCFRGKCYTPGCSCSKYPLCAKD

SEQ ID NO: 2055 - protein, 31 aa, Gloeospermum blakeanum
  REGION 1..31: note = Enzymatic-degradation; Cyclotide; Shows significant enzymatic degradation activity.
GVIPCGESCVFIPCISAVLGCSCKSKVCYRN

SEQ ID NO: 2056 - protein, 31 aa, Gloeospermum pauciflorum
  REGION 1..31: note = Enzymatic-degradation; Cyclotide; Shows significant enzymatic degradation activity.
GVPCGESCVWVPCTVTALMGCSCVREVCRKD

SEQ ID NO: 2057 - protein, 31 aa, Noisettia orchidiflora
  REGION 1..31: note = Noisettia orchidiflora, Clitoria ternatea; "Enzymatic-degradation, Antimicrobial"; Cyclotide; Shown to possess proteolytic activity of trypsin or chymotrypsin./ Shown to possess antimicrobial
GVIPCGESCVFIPCISTLIGCSCKNKVCYRN

SEQ ID NO: 2058 - protein, 29 aa, Viola odorata
  REGION 1..29: note = Viola odorata, Viola tricolor; "Enzymatic-degradation, Antimicrobial"; Cyclotide; "Shows significant enzymatic degradation activity., participates in a plant defense mechanism."
GLPVCGETCVGGTCNTPGCSCSWPVCFRD

SEQ ID NO: 2059 - protein, 29 aa, Psychotria solitudinum
  REGION 1..29: note = "Enzymatic-degradation, Enzyme-inhibitor"; Cyclotide; Shown to possess proteolytic activity of trypsin or chymotrypsin (IC50=25 micro-M)
GLPICGESCVGGTCNTPGCTCTWPVCTRN

SEQ ID NO: 2060 - protein, 8 aa, Oryza sativa
  REGION 1..8: note = Oryza sativa subsp. Japonica; Enzyme-inhibitor; --NA--; inhibits prolyl endopeptidase (IC50=42.8 micro-M)
SPFWNINA

SEQ ID NO: 2061 - protein, 29 aa, Momordica repens
  REGION 1..29: note = Enzyme-inhibitor; --NA--; inhibits trypsin
AICPRILVECKRDSDCPAQCICKRQGYCG

SEQ ID NO: 2062 - protein, 29 aa, Momordica repens
  REGION 1..29: note = Enzyme-inhibitor; --NA--; inhibits trypsin
AICPRILVRCKRDSDCLGQCVCKRQGYCG

SEQ ID NO: 2063 - protein, 30 aa, Cyclanthera pedata
  REGION 1..30: note = Enzyme-inhibitor; --NA--; inhibits trypsin
ARICPRILMKCKKDSDCLAECICEEHGFCG

SEQ ID NO: 2064 - protein, 30 aa, Cyclanthera pedata
  REGION 1..30: note = Enzyme-inhibitor; --NA--; inhibits trypsin
ARICPRILMKCKKDSDCLAECICQEHGFCG

SEQ ID NO: 2065 - protein, 32 aa, Amaranthus hypochondriacus
  REGION 1..32: note = Enzyme-inhibitor; --NA--; is active against alpha-amylases from Tribolium castaneum and Prostephanus truncatus larvae
CIPKWNRCGPKMDGVPCCEPYTCTSDYYGNCS

SEQ ID NO: 2066 - protein, 27 aa, Sechium edule
  REGION 1..27: note = Enzyme-inhibitor; --NA--; inhibits trypsin
CPRILMKCKLDTDCFPTCTCRPSGFCG

SEQ ID NO: 2067 - protein, 27 aa, Trichosanthes kirilowii
  REGION 1..27: note = Enzyme-inhibitor; --NA--; inhibits trypsin
CPRILMPCKVNDDCLRGCKCLSNGYCG

SEQ ID NO: 2068 - protein, 27 aa, Trichosanthes kirilowii
  REGION 1..27: note = Enzyme-inhibitor; --NA--; inhibits trypsin
CPRILMPCQVNDDCLRGCKCLSNGYCG

SEQ ID NO: 2069 - protein, 36 aa, Spinacia oleracea
  REGION 1..36: note = Enzyme-inhibitor; --NA--; inhibits trypsin
DKCSPSGAICSGFGPPEQCCSGACVPHPILRIFVCQ

SEQ ID NO: 2070 - protein, 5 aa, Triticum aestivum
  REGION 1..5: note = Enzyme-inhibitor; --NA--; inhibits the activity of angiotensin-converting enzyme (IC50 = 0.72 micro-M)
DYVGN

SEQ ID NO: 2071 - protein, 37 aa, Mirabilis jalapa
  REGION 1..37: note = Enzyme-inhibitor; --NA--; inhibits trypsin
EDEECAKTDQICPPNAPNYCCSGSCVPHPRLRIFVCA

SEQ ID NO: 2072 - protein, 37 aa, Spinacia oleracea
  REGION 1..37: note = Enzyme-inhibitor; --NA--; inhibits trypsin
EDKCSPSGAICSGFGPPEQCCSGACVPHPILRIFVCQ

SEQ ID NO: 2073 - protein, 31 aa, Sechium edule
  REGION 1..31: note = Enzyme-inhibitor; --NA--; inhibits trypsin
EDRKCPKILMRCKRDSDCLAKCTCQESGYCG

SEQ ID NO: 2074 - protein, 32 aa, Sechium edule
  REGION 1..32: note = Enzyme-inhibitor; --NA--; inhibits trypsin
EEDRKCPKILMRCKRDSDCLAKCTCQESGYCG

SEQ ID NO: 2075 - protein, 31 aa, Momordica charantia
  REGION 1..31: note = Enzyme-inhibitor; --NA--; inhibits elastase
EEERICPLIWMECKRDSDCLAQCICVDGHCG

SEQ ID NO: 2076 - protein, 30 aa, Momordica charantia
  REGION 1..30: note = Enzyme-inhibitor; --NA--; inhibits elastase
EERICPLIWMECKRDSDCLAQCICVDGHCG

SEQ ID NO: 2077 - protein, 30 aa, Momordica charantia
  REGION 1..30: note = Enzyme-inhibitor; --NA--; inhibits trypsin
ERGCPRILKQCKQDSDCPGECICMAHGFCG

SEQ ID NO: 2078 - protein, 29 aa, Momordica charantia
  REGION 1..29: note = Enzyme-inhibitor; --NA--; inhibits elastase
ERICPLIWMECKRDSDCLAQCICVDGHCG

SEQ ID NO: 2079 - protein, 30 aa, Momordica charantia
  REGION 1..30: note = Enzyme-inhibitor; --NA--; inhibits trypsin
ERRCPRILKQCKRDSDCPGECICMAHGFCG

SEQ ID NO: 2080 - protein, 30 aa, Lagenaria leucantha
  REGION 1..30: note = Lagenaria leucantha Rusby var. Gourda makina, Lagenaria siceraria"; Enzyme-inhibitor; --NA--; is serine protease inhibitor
ERRCPRIYMECKHDSDCLADCVCLEHGICG

SEQ ID NO: 2081 - protein, 10 aa, Glycine max
  REGION 1..10: note = Enzyme-inhibitor; --NA--; inhibits human DNA topoisomerase II (IC50=2.4 micro-M).
FEITPEKNPQ

SEQ ID NO: 2082 - protein, 33 aa, Momordica charantia
  REGION 1..33: note = Enzyme-inhibitor; --NA--; --NA--
GCAGKACNLLGLTCDAGCFCRPDGVGIVAGVCV

SEQ ID NO: 2083 - protein, 32 aa, Momordica charantia
  REGION 1..32: note = Enzyme-inhibitor; --NA--; --NA--
GCAGKSCNILGSDPCDAGCFCLPVGIVAGVCV

SEQ ID NO: 2084 - protein, 30 aa, Ecballium elaterium
  REGION 1..30: note = Enzyme-inhibitor; --NA--; inhibits trypsin
GCPRILMRCKQDSDCLAGCVCGPNGFCGSP

SEQ ID NO: 2085 - protein, 7 aa, Gypsophila oldhamiana
  REGION 1..7: note = Enzyme-inhibitor; --NA--; inhibits alpha-glucosidase.
GFDFILP

SEQ ID NO: 2086 - protein, 29 aa, Momordica repens
  REGION 1..29: note = Enzyme-inhibitor; --NA--; inhibits trypsin
GICPRILMECKRDSDCLAQCVCKRQGYCG

SEQ ID NO: 2087 - protein, 29 aa, Luffa cylindrica
  REGION 1..29: note = Enzyme-inhibitor; --NA--; inhibits trypsin
GICPRILMPCKTDDDCMLDCRCLSNGYCG

SEQ ID NO: 2088 - protein, 30 aa, Citrullus vulgaris
  REGION 1..30: note = Citrullus vulgaris, Citrullus lanatus; Enzyme-inhibitor; --NA--; inhibits trypsin
GRRCPRIYMECKRDADCLADCVCLQHGICG

SEQ ID NO: 2089 - protein, 31 aa, Trichosanthes kirilowii
  REGION 1..31: note = Enzyme-inhibitor; --NA--; inhibits trypsin
GVVACPRILMPCKVNDDCLRGCKCLSNGYCG

SEQ ID NO: 2090 - protein, 32 aa, Cucurbita pepo
  REGION 1..32: note = Enzyme-inhibitor; --NA--; inhibits trypsin
HEERVCPKILMECKKDSDCLAECICLEHGYCG

SEQ ID NO: 2091 - protein, 32 aa, Cucurbita maxima
  REGION 1..32: note = Enzyme-inhibitor; --NA--; inhibits trypsin
HEERVCPRILMKCKKDSDCLAECVCLEHGYCG

SEQ ID NO: 2092 - protein, 28 aa, Cyclanthera pedata
  REGION 1..28: note = Enzyme-inhibitor; --NA--; inhibits trypsin
ICPRILMECKADSDCLAQCICEESGFCG

SEQ ID NO: 2093 - protein, 28 aa, Cyclanthera pedata
  REGION 1..28: note = Enzyme-inhibitor; --NA--; inhibits trypsin
ICPRILMECKADSDCLAQCICQESGFCG

SEQ ID NO: 2094 - protein, 28 aa, Luffa acutangula
  REGION 1..28: note = Enzyme-inhibitor; --NA--; inhibits trypsin
ICPRILMECSHDSDCFGECICLSSGYCG

SEQ ID NO: 2095 - protein, 28 aa, Luffa cylindrica
  REGION 1..28: note = Enzyme-inhibitor; --NA--; inhibits trypsin
ICPRILMPCSSDSDCLAECICLENGFCG

SEQ ID NO: 2096 - protein, 27 aa, Momordica charantia
  REGION 1..27: note = Momordica charantia, Luffa cylindrica; Enzyme-inhibitor; --NA--; inhibits trypsin
ICPRIWMECKRDSDCMAQCICVDGHCG

SEQ ID NO: 2097 - protein, 10 aa, Glycine max
  REGION 1..10: note = Enzyme-inhibitor; --NA--; inhibits human DNA topoisomerase II (IC50=4.0 micro-M).
IETWNPNNKP

SEQ ID NO: 2098 - protein, 24 aa, Cucumis melo
  REGION 1..24: note = Enzyme-inhibitor; --NA--; inhibits trypsin
ILMKCKQDSDCLLDCVCLKEGFCG

SEQ ID NO: 2099 - protein, 24 aa, Cucumis melo
  REGION 1..24: note = Enzyme-inhibitor; --NA--; inhibits trypsin
ILMKCKTDRDCLTGCTCKRNGYCG

SEQ ID NO: 2100 - protein, 29 aa, Luffa acutangula
  REGION 1..29: note = Enzyme-inhibitor; --NA--; inhibits trypsin
IRCPRYLMECKHDSDCLGECICLESGFCG

SEQ ID NO: 2101 - protein, 38 aa, Solanum tuberosum
  REGION 1..38: note = Enzyme-inhibitor; --NA--; inhibits metallocarboxypeptidase; may play a defensive role against insect attacks
JHADPICNKPCKTHDDCSGAWFCQACWNSARTCGPYVG

SEQ ID NO: 2102 - protein, 14 aa, Oryza sativa
  REGION 1..14: note = Oryza sativa subsp. Japonica; Enzyme-inhibitor; --NA--; inhibits prolyl endopeptidase (IC50=11.8 micro-M)
JLFGPSTNPWHSPR

SEQ ID NO: 2103 - protein, 13 aa, Oryza sativa
  REGION 1..13: note = Oryza sativa subsp. Japonica; Enzyme-inhibitor; --NA--; inhibits prolyl endopeptidase (IC50=24.3 micro-M)
JLFNPSTNPWHSP

SEQ ID NO: 2104 - protein, 14 aa, Oryza sativa
  REGION 1..14: note = Oryza sativa subsp. Japonica; Enzyme-inhibitor; --NA--; inhibits prolyl endopeptidase (IC50=14.1 micro-M)
JLFNPSTNPWHSPR

SEQ ID NO: 2105 - protein, 38 aa, Opuntia streptacantha
  REGION 1..38: note = Opuntia streptacantha, Opuntia cardona; Enzyme-inhibitor; --NA--; "inhibits trypsin-like proteases from the guts of the insect pests P.truncatus, P.americana, Acheta"
JQCAERGQSCNPYEGIECCGDILCIQPRIWPPVPGRCA

SEQ ID NO: 2106 - protein, 39 aa, Solanum tuberosum
  REGION 1..39: note = Enzyme-inhibitor; --NA--; inhibits metallocarboxypeptidase; may play a defensive role against insect attacks
JQHADPICNKPCKTHDDCSGAWFCQACWNSARTCGPYVG

SEQ ID NO: 2107 - protein, 37 aa, Lycopersicon esculentum
  REGION 1..37: note = Enzyme-inhibitor; --NA--; inhibits metallocarboxypeptidese; may play a defensive role against insect attacks
JQYDPVCHKPCSTQDDCSGGTFCQACWRFAGTCGPYV

SEQ ID NO: 2108 - protein, 30 aa, Momordica cochinchinensis
  REGION 1..30: note = Enzyme-inhibitor; --NA--; inhibits trypsin
JRACPRILKKCRRDSDCPGECICKENGYCG

SEQ ID NO: 2109 - protein, 30 aa, Momordica charantia
  REGION 1..30: note = Enzyme-inhibitor; --NA--; is serine protease inhibitor
JRGCPRILKQCKQDSDCPGECICMAHGFCG

SEQ ID NO: 2110 - protein, 30 aa, Cucumis melo
  REGION 1..30: note = Enzyme-inhibitor; --NA--; inhibits trypsin
JRMCPKILMKCKQDSDCLLDCVCLKEGFCG

SEQ ID NO: 2111 - protein, 30 aa, Momordica charantia
  REGION 1..30: note = Enzyme-inhibitor; --NA--; is serine protease inhibitor
JRRCPRILKQCKRDSDCPGECICMAHGFCG

SEQ ID NO: 2112 - protein, 30 aa, Lagenaria leucantha
  REGION 1..30: note = Lagenaria leucantha Rusby var. Depressa makina, Luffa cylindrica; Enzyme-inhibitor; --NA--; inhibits bovine trypsin
JRRCPRIYMECKHDSDCLADCVCLEHGICG

SEQ ID NO: 2113 - protein, 31 aa, Lagenaria leucantha
  REGION 1..31: note = Lagenaria leucantha Rusby var. Gourda makina, Lagenaria siceraria"; Enzyme-inhibitor; --NA--; inhibits trypsin
JRRCPRIYMECKHDSDCLADCVCLEHGICGG

SEQ ID NO: 2114 - protein, 35 aa, Spinacia oleracea
  REGION 1..35: note = Enzyme-inhibitor; --NA--; inhibits trypsin
KCSPSGAICSGFGPPEQCCSGACVPHPILRIFVCQ

SEQ ID NO: 2115 - protein, 33 aa, Echinocystis lobata
  REGION 1..33: note = Enzyme-inhibitor; --NA--; inhibits trypsin (association constant with bovine-trypsin is determined to be 6.6x10(-10) micro-M
KEEQRVCPRILMRCKRDSDCLAQCTCQQSGFCG

SEQ ID NO: 2116 - protein, 41 aa, Trichosanthes kirilowii
  REGION 1..41: note = Enzyme-inhibitor; --NA--; inhibits trypsin
LLMPVKPNDDRVIGCWCISRGYLCGCMPCKLNDDSLCGRKG

SEQ ID NO: 2117 - protein, 10 aa, Oryza sativa
  REGION 1..10: note = Oryza sativa subsp. Japonica; Enzyme-inhibitor; --NA--; inhibits prolyl endopeptidase (IC50=24.3 micro-M)
LLSPFWNINA

SEQ ID NO: 2118 - protein, 9 aa, Oryza sativa
  REGION 1..9: note = Oryza sativa subsp. Japonica; Enzyme-inhibitor; --NA--; inhibits prolyl endopeptidase (IC50=29.0 micro-M)
LSPFWNINA

SEQ ID NO: 2119 - protein, 28 aa, Cucumis melo
  REGION 1..28: note = Enzyme-inhibitor; --NA--; inhibits trypsin
MCPKILMKCKQDSDCLLDCVCLKEGFCG

SEQ ID NO: 2120 - protein, 21 aa, Solanum tuberosum
  REGION 1..21: note = Enzyme-inhibitor; --NA--; inhibits proteinases
MESKFAHIIVFFLLKKYSFKM

SEQ ID NO: 2121 - protein, 30 aa, Cucumis sativus
  REGION 1..30: note = Enzyme-inhibitor; --NA--; inhibits trypsin
MMCPRILMKCKHDSDCLPGCVCLEHIEYCG

SEQ ID NO: 2122 - protein, 32 aa, Cucumis sativus
  REGION 1..32: note = Enzyme-inhibitor; --NA--; inhibits trypsin
MVCPKILMKCKHDSDCLLDCVCLEDIGYCGVS

SEQ ID NO: 2123 - protein, 34 aa, Veronica hederifolia
  REGION 1..34: note = Enzyme-inhibitor; --NA--; inhibits bovine trypsin.
NTDPEQCKVMCYAQRHSSPELLRRCLDNCEKEHD

SEQ ID NO: 2124 - protein, 47 aa, Oryza sativa
  REGION 1..47: note = Oryza sativa subsp. Japonica; Enzyme-inhibitor; --NA--; is cysteine protease inhibitor
PGWRDVPVHDPVVKDAADHAVKSIQQRSNSLFPYELLEIVRAKAEVV

SEQ ID NO: 2125 - protein, 18 aa, Ipomoea batatas
  REGION 1..18: note = Enzyme-inhibitor; Defensin; inhibits trypsin raising sporamin expression level.
REAKSPPPSPKPSDPKNP

SEQ ID NO: 2126 - protein, 18 aa, Ipomoea batatas
  REGION 1..18: note = Enzyme-inhibitor; Defensin; inhibits trypsin raising sporamin expression level.
REARSPPPAPEKDIPTHP

SEQ ID NO: 2127 - protein, 18 aa, Ipomoea batatas
  REGION 1..18: note = Enzyme-inhibitor; --NA--; inhibits trypsin raising sporamin expression level.
REEKPPPPAPETDDPNRP

SEQ ID NO: 2128 - protein, 18 aa, Ipomoea batatas
  REGION 1..18: note = Enzyme-inhibitor; --NA--; inhibits trypsin raising sporamin expression level.
REEKSPPPAPEADDPNRP

SEQ ID NO: 2129 - protein, 18 aa, Ipomoea batatas
  REGION 1..18: note = Enzyme-inhibitor; --NA--; inhibits trypsin raising sporamin expression level.
REEKSPPPAPETDDPNRP

SEQ ID NO: 2130 - protein, 18 aa, Ipomoea batatas
  REGION 1..18: note = Enzyme-inhibitor; --NA--; inhibits trypsin raising sporamin expression level.
REPKSPPPSPKPSDPKNP

SEQ ID NO: 2131 - protein, 18 aa, Ipomoea batatas
  REGION 1..18: note = Enzyme-inhibitor; --NA--; inhibits trypsin raising sporamin expression level.
RGAKSPPPSPKPSDPINP

SEQ ID NO: 2132 - protein, 29 aa, Bryonia dioica
  REGION 1..29: note = Enzyme-inhibitor; --NA--; inhibits trypsin
RGCPRILMRCKRDSDCLAGCVCQKNGYCG

SEQ ID NO: 2133 - protein, 28 aa, Momordica charantia
  REGION 1..28: note = Enzyme-inhibitor; --NA--; inhibits elastase
RICPLIWMECKRDSDCLAQCICVDGHCG

SEQ ID NO: 2134 - protein, 29 aa, Cyclanthera pedata
  REGION 1..29: note = Enzyme-inhibitor; --NA--; inhibits trypsin
RICPRILMECKADSDCLAQCICEESGFCG

SEQ ID NO: 2135 - protein, 29 aa, Cyclanthera pedata
  REGION 1..29: note = Enzyme-inhibitor; --NA--; inhibits trypsin
RICPRILMECKADSDCLAQCICQENGFCG

SEQ ID NO: 2136 - protein, 29 aa, Cyclanthera pedata
  REGION 1..29: note = Enzyme-inhibitor; --NA--; inhibits trypsin
RICPRILMECKADSDCLAQCICQESGFCG

SEQ ID NO: 2137 - protein, 29 aa, Luffa cylindrica
  REGION 1..29: note = Enzyme-inhibitor; --NA--; is serine protease inhibitor
RICPRILMECSSDSDCLAECICLENGFCG

SEQ ID NO: 2138 - protein, 30 aa, Luffa cylindrica
  REGION 1..30: note = Enzyme-inhibitor; --NA--; inhibits trypsin
RICPRILMECSSDSDCLAECICLEQDGFCG

SEQ ID NO: 2139 - protein, 29 aa, Luffa cylindrica
  REGION 1..29: note = Enzyme-inhibitor; --NA--; inhibits trypsin
RICPRILMECSSDSDCLAECICLEQGFCG

SEQ ID NO: 2140 - protein, 29 aa, Luffa cylindrica
  REGION 1..29: note = Enzyme-inhibitor; --NA--; is serine protease inhibitor
RICPRILMECSYDSDCFGECICLPSGYCG

SEQ ID NO: 2141 - protein, 28 aa, Momordica charantia
  REGION 1..28: note = Momordica charantia, Luffa cylindrica; Enzyme-inhibitor; --NA--; inhibits trypsin
RICPRIWMECKRDSDCMAQCICVDGHCG

SEQ ID NO: 2142 - protein, 47 aa, Ipomoea batatas
  REGION 1..47: note = Enzyme-inhibitor; --NA--; --NA--
RMCESASSKFKGPCSRDSNCATVCHTEGFTGGDCKGFRRRCFCTKPC

SEQ ID NO: 2143 - protein, 29 aa, Cucumis melo
  REGION 1..29: note = Enzyme-inhibitor; --NA--; inhibits trypsin
RMCPKILMKCKQDSDCLLDCVCLKEGFCG

SEQ ID NO: 2144 - protein, 29 aa, Lagenaria leucantha
  REGION 1..29: note = Lagenaria leucantha Rusby var. Gourda makina, Lagenaria siceraria"; Enzyme-inhibitor; --NA--; inhibits trypsin
RRCPRIYMECKHDSDCLADCVCLEHGICG

SEQ ID NO: 2145 - protein, 30 aa, Lagenaria leucantha
  REGION 1..30: note = Lagenaria leucantha Rusby var. Gourda makina, Lagenaria siceraria"; Enzyme-inhibitor; --NA--; inhibits trypsin
RRCPRIYMECKHDSDCLADCVCLEHGICGG

SEQ ID NO: 2146 - protein, 29 aa, Benincasa hispida
  REGION 1..29: note = Enzyme-inhibitor; --NA--; trypsin inhibitory activity: Ki is approx. 10-9 micro-M
RRCPRIYMECKHDSDCLADCVCLPQGICG

SEQ ID NO: 2147 - protein, 28 aa, Momordica charantia
  REGION 1..28: note = Enzyme-inhibitor; --NA--; inhibits trypsin
RSCPRIWMECTRDSDCMAKCICVAGHCG

SEQ ID NO: 2148 - protein, 18 aa, Ipomoea batatas
  REGION 1..18: note = Enzyme-inhibitor; --NA--; inhibits trypsin raising sporamin expression level.
RTARPPPPAPKPAAPIHP

SEQ ID NO: 2149 - protein, 46 aa, Glycine max
  REGION 1..46: note = Enzyme-inhibitor; --NA--; is a proteinase inhibitor.
RVCESQSHGFHGLCNRDHNCALVCRNEGFSGGRCKRSRRCFCTRIC

SEQ ID NO: 2150 - protein, 47 aa, Phaseolus coccineus
  REGION 1..47: note = Enzyme-inhibitor; --NA--; --NA--
RVCESQSHGFKGACTGDHNCALVCRNEGFSGGNCRGFRRRCFCTKIC

SEQ ID NO: 2151 - protein, 48 aa, Sorghum vulgare
  REGION 1..48: note = Sorghum vulgare, Sorghum bicolor; Enzyme-inhibitor; --NA--; strongly inhibits the alpha-amylases from the guts of locust and cockroach
RVCMGKSAGFKGLCMRDQNCAQVCLQEGWGGGNCDGVMRQCKCIRQCW

SEQ ID NO: 2152 - protein, 47 aa, Sorghum vulgare
  REGION 1..47: note = Sorghum vulgare, Sorghum bicolor; Enzyme-inhibitor; --NA--; inhibits alpha-amylase 1
RVCMGKSQHHSFPCISDRLCSNECVKEEGGWTAGRCHLRYCRCQKAC

SEQ ID NO: 2153 - protein, 29 aa, Cucurbita pepo
  REGION 1..29: note = Enzyme-inhibitor; --NA--; inhibits trypsin
RVCPKILMECKKDSDCLAECICLEHGYCG

SEQ ID NO: 2154 - protein, 29 aa, Cucurbita maxima
  REGION 1..29: note = Enzyme-inhibitor; --NA--; inhibits trypsin
RVCPRILMECKKDSDCLAECVCLEHGYCG

SEQ ID NO: 2155 - protein, 29 aa, Cucurbita maxima
  REGION 1..29: note = Cucurbita maxima, Luffa cylindrica; Enzyme-inhibitor; --NA--; inhibits trypsin
RVCPRILMKCKKDSDCLAECVCLEHGYCG

SEQ ID NO: 2156 - protein, 29 aa, Echinocystis lobata
  REGION 1..29: note = Enzyme-inhibitor; --NA--; inhibits trypsin (association constant with bovine-trypsin is determined to be 3.1x10(-11) micro-M
RVCPRILMRCKRDSDCLAQCTCQQSGFCG

SEQ ID NO: 2157 - protein, 48 aa, Sorghum vulgare
  REGION 1..48: note = Sorghum vulgare, Sorghum bicolor; Enzyme-inhibitor; --NA--; strongly inhibits the alpha-amylases from the guts of locust and cockroach
RVCRRRSAGFKGLCMSDHNCAQVCLQEGWGGGNCDGVIRQCKCIRQCW

SEQ ID NO: 2158 - protein, 47 aa, Sorghum vulgare
  REGION 1..47: note = Sorghum vulgare, Sorghum bicolor; Enzyme-inhibitor; --NA--; inhibits the alpha-amylases from the guts of lokust and cockroach
RVCRRRSAGFKGLCMSDHNCAQVCLQEGWGGGNCDGVMRQCKCIRQC

SEQ ID NO: 2159 - protein, 47 aa, Vitis vinifera
  REGION 1..47: note = Enzyme-inhibitor; --NA--; --NA--
SEWQVVPTNDPEVQDAANHVVKSIQMRSNSIFRYELLEILLAKAKVI

SEQ ID NO: 2160 - protein, 34 aa, Momordica cochinchinensis
  REGION 1..34: note = Enzyme-inhibitor; --NA--; inhibits trypsin
SGSDGGVCPKILKKCRRDSDCPGACICRGNGYCG

SEQ ID NO: 2161 - protein, 34 aa, Momordica cochinchinensis
  REGION 1..34: note = Enzyme-inhibitor; --NA--; inhibits trypsin
SGSDGGVCPKILQRCRRDSDCPGACICRGNGYCG

SEQ ID NO: 2162 - protein, 5 aa, Triticum aestivum
  REGION 1..5: note = Enzyme-inhibitor; --NA--; inhibits the activity of angiotensin-converting enzyme (IC50 = 0.86 micro-M)
TYLGS

SEQ ID NO: 2163 - protein, 6 aa, Glycine max
  REGION 1..6: note = Enzyme-inhibitor; Glycinin; inhibits human DNA topoisomerase II (IC50=7.9 micro-M).
VFDGEL

SEQ ID NO: 2164 - protein, 29 aa, Cucumis melo
  REGION 1..29: note = Enzyme-inhibitor; --NA--; inhibits trypsin
VGCPRILMKCKTDDDCLLGCKCLSNGYCG

SEQ ID NO: 2165 - protein, 29 aa, Cucumis melo
  REGION 1..29: note = Enzyme-inhibitor; --NA--; inhibits trypsin
VGCPRILMKCKTDRDCLTGCTCKRNGYCG

SEQ ID NO: 2166 - protein, 6 aa, Triticum aestivum
  REGION 1..6: note = Enzyme-inhibitor; --NA--; inhibits angiotensin-I-converting-enzyme (IC50=26.2 micro-M); inhibits angiotensin-I-converting-enzyme
VPFGVG

SEQ ID NO: 2167 - protein, 6 aa, Ficus carica
  REGION 1..6: note = Ficus carica, Zea mays; Enzyme-inhibitor; --NA--; inhibits angiotensin-I-converting-enzyme (IC50=13 micro-M).
AVNPIR

SEQ ID NO: 2168 - protein, 5 aa, Zea mays
  REGION 1..5: note = Enzyme-inhibitor; --NA--; inhibits angiotensin-I-converting-enzyme (IC50=160 micro-M).
IRAQQ

SEQ ID NO: 2169 - protein, 6 aa, Sesamum indicum
  REGION 1..6: note = Enzyme-inhibitor; --NA--; inhibits the activity of angiotensin-converting enzyme.
VLYRDG

SEQ ID NO: 2170 - protein, 5 aa, Triticum aestivum
  REGION 1..5: note = Enzyme-inhibitor; Bioactive peptides; inhibits the activity of angiotensin-converting enzyme (IC50 = 3.4 micro-M)
DIGYY

SEQ ID NO: 2171 - protein, 47 aa, Vigna unguiculata
  REGION 1..47: note = Enzyme-inhibitor; Thionin; inhibits trypsin
RVCESQSHGFKGACTGDHNCALVCRNEGFSGGNCRGFRRRCFCTLKC

SEQ ID NO: 2172 - protein, 8 aa, Helianthus annuus
  REGION 1..8: note = "Enzyme-inhibitor, ACE-inhibitor, Antihypertensive"; 11S-globulin; These are a potential source of ACE inhibitory peptides when hydrolyzed with pepsin and pancreatin
FVNPQAGS

SEQ ID NO: 2173 - protein, 5 aa, Ficus carica
  REGION 1..5: note = "Enzyme-inhibitor, Antihypertensive"; --NA--; inhibits angiotensin-I-converting-enzyme (IC50=4.5 micro-M).
LYPVK

SEQ ID NO: 2174 - protein, 5 aa, Sesamum indicum
  REGION 1..5: note = "Enzyme-inhibitor, Antihypertensive"; --NA--; inhibits the activity of angiotensin-converting enzyme (IC50=1.58 micro-M).
MLPAY

SEQ ID NO: 2175 - protein, 5 aa, Glycine max
  REGION 1..5: note = "Enzyme-inhibitor, Antihypertensive"; --NA--; inhibits angiotensin I-converting enzyme with the IC50 = 1.69 micro-M.
VLIVP

SEQ ID NO: 2176 - protein, 5 aa, Oryza sativa
  REGION 1..5: note = "Enzyme-inhibitor, Antihypertensive, ACE-inhibitor"; Bioactive peptides; inhibits angiotensin-I-converting-enzyme (IC50=4.1 micro-M).
IYPRY

SEQ ID NO: 2177 - protein, 6 aa, Vigna radiata
  REGION 1..6: note = "Enzyme-inhibitor, Antihypertensive, ACE-inhibitor"; Bioactive peptides; inhibits angiotensin I-converting enzyme with the IC50 = 82.4 micro-M.
VTPALR

SEQ ID NO: 2178 - protein, 6 aa, Glycine max
  REGION 1..6: note = "Enzyme-inhibitor, Antihypertensive, ACE-inhibitor"; --NA--; inhibits angiotensin-I-converting-enzyme (IC50=14 micro-M).
YLAGNQ

SEQ ID NO: 2179 - protein, 7 aa, Triticum aestivum
  REGION 1..7: note = Triticum aestivum, Olea europaea; "Enzyme-inhibitor, Antioxidant"; --NA--; inhibits the activity of angiotensin-converting enzyme (IC50 = 1.7 micro-M)
APGAGVY

SEQ ID NO: 2180 - protein, 7 aa, Spinacia oleracea
  REGION 1..7: note = "Enzyme-inhibitor, Antioxidant, Antihypertensive, ACE-inhibitor"; --NA--; inhibits angiotensin-I-converting-enzyme (IC50=4.2 micro-M); possesses antioxidative activity.
IAYKPAG

SEQ ID NO: 2181 - protein, 5 aa, Spinacia oleracea
  REGION 1..5: note = "Enzyme-inhibitor, Antioxidant, Antihypertensive, ACE-inhibitor"; --NA--; inhibits angiotensin-I-converting-enzyme (IC50=2.1 micro-M); possesses antioxidative activity.
MRWRD

SEQ ID NO: 2182 - protein, 8 aa, Vitis vinifera
  REGION 1..8: note = "Enzyme-inhibitor, Neuropeptide"; --NA--; inhibits angiotensin-I-converting-enzyme (IC50=17.5 micro-M).
LIPPGVPY

SEQ ID NO: 2183 - protein, 6 aa, Vitis vinifera
  REGION 1..6: note = "Enzyme-inhibitor, Neuropeptide"; --NA--; inhibits angiotensin-I-converting-enzyme (IC50=25.7 micro-M).
WVPSVY

SEQ ID NO: 2184 - protein, 5 aa, Vitis vinifera
  REGION 1..5: note = "Enzyme-inhibitor, Neuropeptide"; --NA--; inhibits angiotensin-I-converting-enzyme (IC50=26.4 micro-M).
YYAPF

SEQ ID NO: 2185 - protein, 9 aa, Vitis vinifera
  REGION 1..9: note = "Enzyme-inhibitor, Neuropeptide"; --NA--; inhibits angiotensin-I-converting-enzyme (IC50=83.0 micro-M).
YYAPFDGIL

SEQ ID NO: 2186 - protein, 7 aa, Glycine max
  REGION 1..7: note = "Enzyme-inhibitor, Neuropeptide"; --NA--; inhibits angiotensin-I-converting-enzyme (IC50=920 micro-M).
ASYDTKF

SEQ ID NO: 2187 - protein, 10 aa, Glycine max
  REGION 1..10: note = "Enzyme-inhibitor, Neuropeptide"; --NA--; inhibits angiotensin-I-converting-enzyme (IC50=730 micro-M).
EDENNPFYLR

SEQ ID NO: 2188 - protein, 7 aa, Glycine max
  REGION 1..7: note = "Enzyme-inhibitor, Neuropeptide, Antihypertensive"; --NA--; inhibits angiotensin-I-converting-enzyme (IC50=33 micro-M).
PNNKPFQ

SEQ ID NO: 2189 - protein, 5 aa, Glycine max
  REGION 1..5: note = "Enzyme-inhibitor, Neuropeptide, Antihypertensive"; --NA--; inhibits angiotensin-I-converting-enzyme (IC50=200 micro-M).
TPRVF

SEQ ID NO: 2190 - protein, 8 aa, Glycine max
  REGION 1..8: note = "Enzyme-inhibitor, Neuropeptide, Antihypertensive, ACE-inhibitor"; --NA--; inhibits angiotensin-I-converting-enzyme (IC50=70 micro-M).
LAIPVNKP

SEQ ID NO: 2191 - protein, 9 aa, Glycine max
  REGION 1..9: note = "Enzyme-inhibitor, Neuropeptide, Antihypertensive, Hypotensive"; Bioactive peptides; inhibits angiotensin-I-converting-enzyme (IC50=64 micro-M).
IPPGVPYWT

SEQ ID NO: 2192 - protein, 5 aa, Glycine max
  REGION 1..5: note = "Enzyme-inhibitor, Neuropeptide, Antihypertensive, Hypotensive"; Bioactive peptides; inhibits angiotensin-I-converting-enzyme (IC50=44 micro-M).
YVVFK

SEQ ID NO: 2193 - protein, 9 aa, Vaccaria hispanica
  REGION 1..9: note = Estrogen-like-activity; Orbitide; Shows a potent Estrogen-like activity.
FGTHGLPAP

SEQ ID NO: 2194 - protein, 8 aa, Citrus sinensis
  REGION 1..8: note = Estrogen-like-activity; Orbitide; Shows a potent Estrogen-like activity.
GAPWLIAA

SEQ ID NO: 2195 - protein, 8 aa, Citrus aurantium
  REGION 1..8: note = Estrogen-like-activity; Orbitide; Shows a potent Estrogen-like activity.
GLLLPPFG

SEQ ID NO: 2196 - protein, 6 aa, Vaccaria hispanica
  REGION 1..6: note = Estrogen-like-activity; Orbitide; Shows a potent Estrogen-like activity.
GLPGWP

SEQ ID NO: 2197 - protein, 7 aa, Vaccaria hispanica
  REGION 1..7: note = Estrogen-like-activity; Orbitide; Shows a potent Estrogen-like activity.
GLSFAFP

SEQ ID NO: 2198 - protein, 6 aa, Citrus aurantium
  REGION 1..6: note = Estrogen-like-activity; Orbitide; Shows a potent Estrogen-like activity.
GLVLPS

SEQ ID NO: 2199 - protein, 7 aa, Dianthus caryophyllus
  REGION 1..7: note = Estrogen-like-activity; Orbitide; Shows a potent Estrogen-like activity.
GPIPFYG

SEQ ID NO: 2200 - protein, 7 aa, Citrus sinensis
  REGION 1..7: note = Estrogen-like-activity; Orbitide; Shows a potent Estrogen-like activity.
GRPWNLA

SEQ ID NO: 2201 - protein, 5 aa, Vaccaria hispanica
  REGION 1..5: note = Estrogen-like-activity; Orbitide; Shows a potent Estrogen-like activity.
GRVKA

SEQ ID NO: 2202 - protein, 5 aa, Vaccaria hispanica
  REGION 1..5: note = Estrogen-like-activity; Orbitide; Shows a potent Estrogen-like activity.
GVAWA

SEQ ID NO: 2203 - protein, 5 aa, Vaccaria hispanica
  REGION 1..5: note = Estrogen-like-activity; Orbitide; Shows a potent Estrogen-like activity.
GVKYA

SEQ ID NO: 2204 - protein, 6 aa, Vaccaria hispanica
  REGION 1..6: note = Estrogen-like-activity; Orbitide; Shows a potent Estrogen-like activity.
GVPVWA

SEQ ID NO: 2205 - protein, 8 aa, Citrus sinensis
  REGION 1..8: note = Estrogen-like-activity; Orbitide; Shows a potent Estrogen-like activity.
GVPWAIAA

SEQ ID NO: 2206 - protein, 6 aa, Dianthus caryophyllus
  REGION 1..6: note = Estrogen-like-activity; Orbitide; Shows a potent Estrogen-like activity.
GYKDCC

SEQ ID NO: 2207 - protein, 5 aa, Citrus sinensis
  REGION 1..5: note = Estrogen-like-activity; Orbitide; Shows a potent Estrogen-like activity.
GYVAA

SEQ ID NO: 2208 - protein, 5 aa, Vaccaria hispanica
  REGION 1..5: note = Estrogen-like-activity; Orbitide; Shows a potent Estrogen-like activity.increases the weight of ovariectomized rat uterus
GYRFS

SEQ ID NO: 2209 - protein, 5 aa, Vaccaria segetalis
  REGION 1..5: note = Estrogen-like-activity; --NA--; exhibits estrogen-like activity; increases the weight of ovariectomized rat uterus
GAYKV

SEQ ID NO: 2210 - protein, 7 aa, Citrus natsudaidai
  REGION 1..7: note = "Estrogen-like-activity, Neuropeptide"; Orbitide; "Shows a potent Estrogen-like activity., is vasodilator, relaxes norepinephrine-induced contraction"
GYLLPPS

SEQ ID NO: 2211 - protein, 8 aa, Glycine max
  REGION 1..8: note = Gene-expression-activator; --NA--; is capable of inducing the expression of both Glyma12g00990 (GmPROPEP914) and Glyma09g36370 (GmPRO
DHPRGGNY

SEQ ID NO: 2212 - protein, 8 aa, Glycine max
  REGION 1..8: note = Gene-expression-activator; --NA--; is capable of inducing the expression of both Glyma12g00990 (GmPROPEP914) and Glyma09g36370 (GmPRO
DLPRGGNY

SEQ ID NO: 2213 - protein, 18 aa, Petunia hybrida
  REGION 1..18: note = Gene-expression-activator; --NA--; is powerful wound signal that activate the expression of defensive genes.
RGKRLPPPAPEYDPPYHQ

SEQ ID NO: 2214 - protein, 20 aa, Petunia hybrida
  REGION 1..20: note = Gene-expression-activator; --NA--; is powerful wound signal that activate the expression of defensive genes.
RHDYHLSPPPAPKPADHTGQ

SEQ ID NO: 2215 - protein, 19 aa, Petunia hybrida
  REGION 1..19: note = Gene-expression-activator; --NA--; is powerful wound signal that activate the expression of defensive genes.
RSLHKSPPPTPKPSDEQGQ

SEQ ID NO: 2216 - protein, 23 aa, Zea mays
  REGION 1..23: note = Gene-expression-stimulator; --NA--; "stimulates the expression of Benzoxazineless1, a gene required for the biosynthesis of benzoxazino"
VRRRPTTPGRPREGSGGNGGNHH

SEQ ID NO: 2217 - protein, 11 aa, Oryza sativa
  REGION 1..11: note = Hemolytic; --NA--; Exhibited LPS-neutralizing and angiogenic activities with little or no hemolytic activity against
ERFQPMFRRPG

SEQ ID NO: 2218 - protein, 7 aa, Oryza sativa
  REGION 1..7: note = Hemolytic; --NA--; Exhibited LPS-neutralizing and angiogenic activities with little or no hemolytic activity against
RRVIEPR

SEQ ID NO: 2219 - protein, 7 aa, Oryza sativa
  REGION 1..7: note = Hemolytic; --NA--; Exhibited LPS-neutralizing and angiogenic activities with little or no hemolytic activity against
RSVSKSR

SEQ ID NO: 2220 - protein, 20 aa, Oryza sativa
  REGION 1..20: note = Hemolytic; --NA--; Exhibited LPS-neutralizing and angiogenic activities with little or no hemolytic activity against
RVRQNIDNPNRADTYNPRAG

SEQ ID NO: 2221 - protein, 33 aa, Viola tricolor
  REGION 1..33: note = "Hemolytic, Antimicrobial"; Cyclotide; "Has minimal hemolytic activity, used for pharmaceutical applications., participates in a plant def"
GGTIFDCGESCFLGTCYTKGCSCGEWKLCYGEN

SEQ ID NO: 2222 - protein, 30 aa, Viola hederacea
  REGION 1..30: note = "Hemolytic, Antimicrobial"; Cyclotide; Cycloviolacin H4 has potent haemolytic activity.
GIPCAESCVWIPCTVTALLGCSCSNNVCYN

SEQ ID NO: 2223 - protein, 5 aa, Glycine max
  REGION 1..5: note = "Hypocholesterolemic, Antihypertensive"; Bioactive peptides; Exhibited hypocholesterolemic activity at a dose of 50 mg/kg in mice and also appeared to possess
LPYPR

SEQ ID NO: 2224 - protein, 98 aa, Momordica charantia
  REGION 1..98: note = Hypoglycemic; --NA--; Show a significant blood sugar lowering effect
MGCDEALFKRSTPGVIPTRHMDDPTGGVCLYESIRDTSEPGAVALRDEGKVDESMTDGKDDGHLAERKPVAGDLVAEKDFGASGDVECITPFGDTDEL

SEQ ID NO: 2225 - protein, 11 aa, Glycine max
  REGION 1..11: note = Hypotriglyceridemic; --NA--; "Blocked the active site through interactions within the catalytic triad, the interface cavity and "
EITPEKNPQLR

SEQ ID NO: 2226 - protein, 6 aa, Glycine max
  REGION 1..6: note = Hypotriglyceridemic; --NA--; "Blocked the active site through interactions within the catalytic triad, the interface cavity and "
KNPQLR

SEQ ID NO: 2227 - protein, 14 aa, Glycine max
  REGION 1..14: note = Hypotriglyceridemic; --NA--; "Blocked the active site through interactions within the catalytic triad, the interface cavity and "
RKQEEDEDEEQQRE

SEQ ID NO: 2228 - protein, 10 aa, Jatropha multifida
  REGION 1..10: note = Immunomodulatory; Orbitide; inhibits the classical pathway of complement activation in vitro
AGVWTVWGTI

SEQ ID NO: 2229 - protein, 16 aa, Oryza sativa
  REGION 1..16: note = Oryza sativa subsp. Japonica; Immunomodulatory; --NA--; "It is used for the treatment of multiple sclerosis (MS), i.e. reduced the neurological symptoms."
AEMIDLAAKMLSEGRG

SEQ ID NO: 2230 - protein, 8 aa, Oryza sativa
  REGION 1..8: note = Immunomodulatory; --NA--; It shows phagocytosis-promoting activity for human polymorphonuclear leukocytes and augmented the
GYPMYPLR

SEQ ID NO: 2231 - protein, 9 aa, Glycine max
  REGION 1..9: note = Immunomodulatory; --NA--; "Stimulates phagocytosis of human polymorphonuclear leukocytes, and inhibited alopecia induced by e"
MITLAIFVN

SEQ ID NO: 2232 - protein, 13 aa, Glycine max
  REGION 1..13: note = Immunomodulatory; --NA--; Stimulates phagocytosis of human neutrophils
MITLAIFVNKFGR

SEQ ID NO: 2233 - protein, 17 aa, Triticum aestivum
  REGION 1..17: note = Triticum aestivum, Secale cereale, Hordeum vulgare; Immunomodulatory; --NA--; Shows immunomodulatory activity which causes interleukin-8 release in a chemokine receptor CXCR3-d
PPYCTIVPFGIFGTNYR

SEQ ID NO: 2234 - protein, 7 aa, Jatropha Podagrica
  REGION 1..7: note = Immunomodulatory; "Cyclic Peptide, Orbitide"; Serves as immunomodulator in plants
FAGTIFG

SEQ ID NO: 2235 - protein, 9 aa, Jatropha Podagrica
  REGION 1..9: note = Immunomodulatory; "Cyclic Peptide, Orbitide"; Serves as immunomodulator in plants
GLLGAVWAG

SEQ ID NO: 2236 - protein, 43 aa, Glycine max
  REGION 1..43: note = "Immunomodulatory, Anti-inflammatory, Antimicrobial, Anticancer"; --NA--; Shows in vitro anti-inflammatory activity by inhibiting COX-2/PGE2 and iNOS/NO pathways.
SKWQHQQDSCRKQLQGVNLTPCEKHIMEKIQGRGDDDDDDDDD

SEQ ID NO: 2237 - protein, 12 aa, Glycine max
  REGION 1..12: note = "Immunomodulatory, Immunostimulating"; --NA--; "It increase the number of CD8, CD11b, and CD49b cells in C3H/HeN mouse spleen cell cultures and al"
GGRKQGQHQQEE

SEQ ID NO: 2238 - protein, 12 aa, Fagopyrum esculentum
  REGION 1..12: note = Immunoregulator; --NA--; promotes blast transformation of murine splenocyres at 10 mg/ml; stimulates the proliferation of H
APVLQIKKTGSN

SEQ ID NO: 2239 - protein, 9 aa, Jatropha curcas
  REGION 1..9: note = Immunoregulator; --NA--; displays a moderate inhibition of: 1) classical pathway activity of human complement; 2) prolifera
GLLGTVLLG

SEQ ID NO: 2240 - protein, 5 aa, Amaranthus hypochondriacus
  REGION 1..5: note = Immunoregulator; --NA--; stimulates phagocytic cells implicated in the defense of organism against infection.
KEEAE

SEQ ID NO: 2241 - protein, 10 aa, Triticum durum
  REGION 1..10: note = Immunoregulator; --NA--; prevents celiac peripheral blood lymphocytes from activation by gliadin peptides.
QQPQDAVQPF

SEQ ID NO: 2242 - protein, 13 aa, Glycine max
  REGION 1..13: note = "Immunoregulator, Anticancer"; Bioactive peptides; Stimulated phagocytosis of human neutrophils
MITLAIPVNKPGR

SEQ ID NO: 2243 - protein, 8 aa, Jatropha curcas
  REGION 1..8: note = Immunosuppressive; Orbitide; Inhibition of the proliferation of human T-cells
GLLGTVLL

SEQ ID NO: 2244 - protein, 8 aa, Linum usitatissimum
  REGION 1..8: note = Immunosuppressive; Orbitide; Shown to possess immunosuppressive activity.
PFFWIMLM

SEQ ID NO: 2245 - protein, 8 aa, Linum usitatissimum
  REGION 1..8: note = Immunosuppressive; Orbitide; Shown to possess immunosuppressive activity.
PFFWIMLL

SEQ ID NO: 2246 - protein, 8 aa, Linum usitatissimum
  REGION 1..8: note = Immunosuppressive; Orbitide; Shown to possess immunosuppressive activity.
PFFWIMLM

SEQ ID NO: 2247 - protein, 8 aa, Linum usitatissimum
  REGION 1..8: note = Immunosuppressive; Orbitide; Shown to possess immunosuppressive activity.
PFFWVMLM

SEQ ID NO: 2248 - protein, 8 aa, Linum usitatissimum
  REGION 1..8: note = Immunosuppressive; Orbitide; Shown to possess immunosuppressive activity.
PFFWVMLM

SEQ ID NO: 2249 - protein, 9 aa, Jatropha curcas
  REGION 1..9: note = Immunosuppressive; Orbitide; Rotamase activity of human cyclophilin B
PILLGILGS

SEQ ID NO: 2250 - protein, 8 aa, Linum usitatissimum
  REGION 1..8: note = Immunosuppressive; Orbitide; Shown to possess immunosuppressive activity.
PLFIMLVF

SEQ ID NO: 2251 - protein, 9 aa, Linum usitatissimum
  REGION 1..9: note = Immunosuppressive; Orbitide; Shown to possess immunosuppressive activity.
PPFFVIMLI

SEQ ID NO: 2252 - protein, 9 aa, Linum usitatissimum
  REGION 1..9: note = Immunosuppressive; Orbitide; Shown to possess immunosuppressive activity.
PPFFVIMLI

SEQ ID NO: 2253 - protein, 12 aa, Leonurus japonicus
  REGION 1..12: note = Leonurus japonicus, Leonorus sibiricus; Immunosuppressive; Orbitide; Showed potent immunosuppressive effect on human peripheral blood lymphocytes.
PPYYTPAGPTQY

SEQ ID NO: 2254 - protein, 9 aa, Linum usitatissimum
  REGION 1..9: note = Immunosuppressive; Orbitide; "Possess cytoprotective activity, defends liver cells against several poisonous substances, such as"
PPFFLIILV

SEQ ID NO: 2255 - protein, 46 aa, Vigna radiata
  REGION 1..46: note = Insecticidal; Defensin; --NA--
RTCMIKKEGWGKCLIDTTCAHSCKNRGYIGGDCKGMTRTCYCLVNC

SEQ ID NO: 2256 - protein, 30 aa, Oldenlandia affinis
  REGION 1..30: note = Insecticidal; Cyclotide; Shown to possess insecticidal activity.
GVPCGESCVFIPCLTAVVGCSCSNKVCYLN

SEQ ID NO: 2257 - protein, 30 aa, Petunia x hybrida
  REGION 1..30: note = Petunia x hybrida; Insecticidal; Cyclotide; Shown to possess insecticidal activity.
GIPCGESCAWIPCISAVQGCSCRNKICYRN

SEQ ID NO: 2258 - protein, 31 aa, Petunia hybrida
  REGION 1..31: note = Petunia hybrida, Petunia axillaris; Insecticidal; Cyclotide; Shown to possess insecticidal activity.
GIPCGESCIWIPCTTTALLGCSCSNKVCYKN

SEQ ID NO: 2259 - protein, 30 aa, Petunia integrifolia
  REGION 1..30: note = Insecticidal; Cyclotide; Shown to possess insecticidal activity.
GIPCGESCMWIPCISAAIGCSCTNHVCYKN

SEQ ID NO: 2260 - protein, 30 aa, Petunia hybrida
  REGION 1..30: note = Petunia hybrida, Petunia axillaris; Insecticidal; Cyclotide; Shown to possess insecticidal activity.
GIPCGESCVWIPCISGVQGCSCSNKICYRN

SEQ ID NO: 2261 - protein, 30 aa, Petunia x hybrida
  REGION 1..30: note = Petunia x hybrida; Insecticidal; Cyclotide; Shown to possess insecticidal activity.
GIPCGESCVWMYCITATMGCSCRNKVCYKN

SEQ ID NO: 2262 - protein, 30 aa, Petunia x hybrida
  REGION 1..30: note = Petunia x hybrida; Insecticidal; Cyclotide; Shown to possess insecticidal activity.
GIPCGGSCVWIPCISGVQGCSCSNKICYRN

SEQ ID NO: 2263 - protein, 30 aa, Petunia axillaris
  REGION 1..30: note = Insecticidal; Cyclotide; Shown to possess insecticidal activity.
GLPCGESCIWIECISGAIGCSCRNKVCYRN

SEQ ID NO: 2264 - protein, 30 aa, Oldenlandia affinis
  REGION 1..30: note = Insecticidal; Cyclotide; Shown to possess insecticidal activity.
GLPICGETCFGGTCNTPGCICDPWPVCTRD

SEQ ID NO: 2265 - protein, 29 aa, Oldenlandia affinis
  REGION 1..29: note = Insecticidal; Cyclotide; Shown to possess insecticidal activity.
GSHCGETCFFFGCYKPGCSCDELRQCYKN

SEQ ID NO: 2266 - protein, 30 aa, Petunia x hybrida
  REGION 1..30: note = Petunia x hybrida; Insecticidal; Cyclotide; Shown to possess insecticidal activity.
GVPCGESCVWMYCISAAMGCSCRNKVCYRN

SEQ ID NO: 2267 - protein, 32 aa, Petunia x hybrida
  REGION 1..32: note = Petunia x hybrida; Insecticidal; Cyclotide; Shown to possess insecticidal activity.
QSISCAETCVWIPCATSLIGCSCVNSICTYTN

SEQ ID NO: 2268 - protein, 31 aa, Petunia x hybrida
  REGION 1..31: note = Petunia x hybrida; Insecticidal; Cyclotide; Shown to possess insecticidal activity.
SYTCGESCLWIPCTVTAAFGCYCSNKVCVKD

SEQ ID NO: 2269 - protein, 37 aa, Pisum sativum
  REGION 1..37: note = Insecticidal; Knottin; "It acts as a potent insecticidal agent against major pests in stored crops and vegetables, making "
ASCNGVCSPFEMPPCGTSACRCIPVGLVIGYCRNPSG

SEQ ID NO: 2270 - protein, 37 aa, Pisum sativum
  REGION 1..37: note = Insecticidal; --NA--; Shows potent insecticidal activity by targeting the protein in the insect tissues.
ASCNGVCSPFEMPPCGTSACRCIPVGLVVGYCRNPSG

SEQ ID NO: 2271 - protein, 80 aa, Brassica rapa
  REGION 1..80: note = Insecticidal; Defensin; "Exhibits insecticidal activity, and used for developing cereal crop plants resistant to sap-suckin"
MAKFVSIITLFFAALVLFAAFEAPTMVKAQKLCERSSGTWSGVCGNNNACKNQCINLEGARHGSCNYVFPYHRCICYFPC

SEQ ID NO: 2272 - protein, 13 aa, Canavalia ensiformis
  REGION 1..13: note = "Insecticidal, Antifungal"; urease; "It causes the inhibition of proliferation, induction of morphological alterations with formation o"
AAEDVLNDIGAIS

SEQ ID NO: 2273 - protein, 17 aa, Canavalia ensiformis
  REGION 1..17: note = "Insecticidal, Antifungal"; urease; "It causes the inhibition of proliferation, induction of morphological alterations with formation o"
GKGSSSKPDELHEIIKA

SEQ ID NO: 2274 - protein, 19 aa, Canavalia ensiformis
  REGION 1..19: note = "Insecticidal, Antifungal"; urease; "It causes the inhibition of proliferation, induction of morphological alterations with formation o"
GKGSSSKPDELHEIIKAGA

SEQ ID NO: 2275 - protein, 98 aa, Canavalia ensiformis
  REGION 1..98: note = "Insecticidal, Antifungal"; urease; "It causes the inhibition of proliferation, induction of morphological alterations with formation o"
MGPVNEANCKAAMEIVCRREFGHKEEEDASEGVTTGDPDCPFTKAIPREEYANKYGPTIGDKIRLGDTDLIAEIEKDFALYGDESVFGGGKVIHHHHH

SEQ ID NO: 2276 - protein, 15 aa, Canavalia ensiformis
  REGION 1..15: note = "Insecticidal, Antifungal"; urease; "It causes the inhibition of proliferation, induction of morphological alterations with formation o"
NIHTDTLNEAGFVEH

SEQ ID NO: 2277 - protein, 21 aa, Canavalia ensiformis
  REGION 1..21: note = "Insecticidal, Antifungal"; urease; "It causes the inhibition of proliferation, induction of morphological alterations with formation o"
SIEGNKVIRGGNAIADGPVNE

SEQ ID NO: 2278 - protein, 33 aa, Viola yedoensis
  REGION 1..33: note = "Insecticidal, Anti-HIV, Antiviral"; Cyclotide; Shown to possess insecticidal and anti-HIV activity.
GGTIFDCGETCFLGTCYTAGCSCGNWGLCYGTN

SEQ ID NO: 2279 - protein, 30 aa, Petunia hybrida
  REGION 1..30: note = Petunia hybrida, Petunia axillaris; "Insecticidal, Antimicrobial"; Cyclotide; Shown to possess insecticidal activity.
GIGCGESCVWIPCVSAAIGCSCSNKICYRN

SEQ ID NO: 2280 - protein, 31 aa, Petunia x hybrida
  REGION 1..31: note = Petunia x hybrida; "Insecticidal, Antimicrobial"; Cyclotide; Shown to possess insecticidal activity.
STDCGEPCVYIPCTITALLGCSCLNKVCVRP

SEQ ID NO: 2281 - protein, 29 aa, Hybanthus floribundus
  REGION 1..29: note = "Insecticidal, Antimicrobial"; Cyclotide; "Shown to possess insecticidal activity., participates in a plant defense mechanism."
GEIPCGESCVYLPCFLPNCYCRNHVCYLN

SEQ ID NO: 2282 - protein, 28 aa, Hybanthus floribundus
  REGION 1..28: note = "Insecticidal, Antimicrobial"; Cyclotide; "Shown to possess insecticidal activity, participates in a plant defense mechanism."
GIACGESCAYFGCWIPGCSCRNKVCYFN

SEQ ID NO: 2283 - protein, 30 aa, Hybanthus floribundus
  REGION 1..30: note = "Insecticidal, Antimicrobial"; Cyclotide; "Shown to possess insecticidal activity, participates in a plant defense mechanism."
GIPCGESCVFIPCISGVIGCSCKSKVCYRN

SEQ ID NO: 2284 - protein, 29 aa, Hybanthus floribundus
  REGION 1..29: note = "Insecticidal, Antimicrobial"; Cyclotide; "Shown to possess insecticidal activity, participates in a plant defense mechanism."
GNIPCGESCIFFPCFNPGCSCKDNLCYYN

SEQ ID NO: 2285 - protein, 31 aa, Hybanthus floribundus
  REGION 1..31: note = "Insecticidal, Antimicrobial"; Cyclotide; "Shown to possess insecticidal activity, participates in a plant defense mechanism."
GSVPCGESCVYIPCFTGIAGCSCKSKVCYYN

SEQ ID NO: 2286 - protein, 30 aa, Hybanthus floribundus
  REGION 1..30: note = "Insecticidal, Antimicrobial"; Cyclotide; "Shown to possess insecticidal activity,participates in a plant defense mechanism."
GTPCAESCVYLPCFTGVIGCTCKDKVCYLN

SEQ ID NO: 2287 - protein, 30 aa, Hybanthus floribundus
  REGION 1..30: note = "Insecticidal, Antimicrobial"; Cyclotide; "Shown to possess insecticidal activity, participates in a plant defense mechanism."
GTPCGESCVYIPCFTAVVGCTCKDKVCYLN

SEQ ID NO: 2288 - protein, 29 aa, Viola odorata
  REGION 1..29: note = Viola odorata, Viola tricolor; "Insecticidal, Antimicrobial"; Cyclotide; Shows potent insecticidal and antimicrobial activity; Probably participates in a plant defense mec
GAPICGESCFTGKCYTVQCSCSWPVCTRN

SEQ ID NO: 2289 - protein, 30 aa, Oldenlandia affinis
  REGION 1..30: note = "Insecticidal, Antimicrobial, Hemolytic"; Cyclotide; "Shows a potent inhibitory effect on the growth and development of larvae, participates in a plant "
GLPTCGETCFGGTCNTPGCTCDPWPICTRD

SEQ ID NO: 2290 - protein, 30 aa, Viola odorata
  REGION 1..30: note = Viola odorata, Viola biflora; "Insecticidal, Cytotoxic, Anti-HIV, Antimicrobial, Hemolytic"; Cyclotide; "Shows potent antimicrobial and cytotoxic activity, participates in a plant defense mechanism."
GIPCGESCVWIPCLTSAVGCSCKSKVCYRN

SEQ ID NO: 2291 - protein, 29 aa, Viola odorata
  REGION 1..29: note = Viola odorata, Viola tricolor, Palicourea tetragona; "Insecticidal, Enzymatic-degradation, Antibacterial, Antifungal, Antiviral"; Cyclotide; "Shown to possess insecticidal and enzymatic digestion activity, participates in a plant defense me"
GLPICGETCVGGTCNTPGCTCSWPVCTRN

SEQ ID NO: 2292 - protein, 31 aa, Viola odorata
  REGION 1..31: note = "Insecticidal, Enzymatic-degradation, Antibacterial, Antifungal, Antiviral"; Cyclotide; Shown to possess insecticidal and enzymatic digestion activity.
GLPTCGETCFGGTCNTPGCTCDSSWPICTHN

SEQ ID NO: 2293 - protein, 30 aa, Viola tricolor
  REGION 1..30: note = Viola tricolor, Oldenlandia affinis; "Insecticidal, Enzymatic-degradation, Antimicrobial"; Cyclotide; "Shown to possess insecticidal and enzymatic degradation activity., participates in plant defense m"
GLPVCGETCFGGTCNTPGCACDPWPVCTRN

SEQ ID NO: 2294 - protein, 30 aa, Clitoria ternatea
  REGION 1..30: note = "Insecticidal, Hemolytic, Anthelmintic, Antibacterial, Cytotoxic"; Cyclotide; Shown to possess various antimicrobial and cytotoxic activities.
GIPCGESCVFIPCISTVIGCSCKNKVCYRN

SEQ ID NO: 2295 - protein, 30 aa, Clitoria ternatea
  REGION 1..30: note = "Insecticidal, Hemolytic, Anthelmintic, Antibacterial, Cytotoxic"; Cyclotide; Shown to possess various antimicrobial and cytotoxic activities.
GIPCGESCVFIPCITGIAGCSCKSKVCYRN

SEQ ID NO: 2296 - protein, 29 aa, Clitoria ternatea
  REGION 1..29: note = "Insecticidal, Hemolytic, Anthelmintic, Antibacterial, Cytotoxic"; Cyclotide; Shown to possess various antimicrobial and cytotoxic activities.
GSAFCGETCVLGTCYTPDCSCTALVCLKN

SEQ ID NO: 2297 - protein, 31 aa, Clitoria ternatea
  REGION 1..31: note = "Insecticidal, Hemolytic, Anthelmintic, Antibacterial, Cytotoxic"; Cyclotide; Shown to possess various antimicrobial and cytotoxic activities.
GIPCAESCVWIPCTVTALLGCSCKDKVCYLD

SEQ ID NO: 2298 - protein, 31 aa, Clitoria ternatea
  REGION 1..31: note = "Insecticidal, Hemolytic, Anthelmintic, Antibacterial, Cytotoxic"; Cyclotide; Shown to possess various antimicrobial and cytotoxic activities.
GIPCAESCVWIPCTVTALLGCSCKDKVCYLN

SEQ ID NO: 2299 - protein, 30 aa, Clitoria ternatea
  REGION 1..30: note = "Insecticidal, Hemolytic, Anthelmintic, Antibacterial, Cytotoxic"; Cyclotide; Shown to possess various antimicrobial and cytotoxic activities.
GIPCGESCVFIPCISSVVGCSCKSKVCYLD

SEQ ID NO: 2300 - protein, 30 aa, Clitoria ternatea
  REGION 1..30: note = "Insecticidal, Hemolytic, Anthelmintic, Antibacterial, Cytotoxic"; Cyclotide; Shown to possess various antimicrobial and cytotoxic activities.
GLPCGESCVFIPCITTVVGCSCKNKVCYND

SEQ ID NO: 2301 - protein, 31 aa, Clitoria ternatea
  REGION 1..31: note = "Insecticidal, Hemolytic, Anthelmintic, Antibacterial, Cytotoxic"; Cyclotide; Shown to possess various antimicrobial and cytotoxic activities.
GTVPCGESCVFIPCITGIAGCSCKNKVCYID

SEQ ID NO: 2302 - protein, 31 aa, Clitoria ternatea
  REGION 1..31: note = "Insecticidal, Hemolytic, Anthelmintic, Antibacterial, Cytotoxic"; Cyclotide; Shown to possess various antimicrobial and cytotoxic activities.
GTVPCGESCVFIPCITGIAGCSCKNKVCYIN

SEQ ID NO: 2303 - protein, 31 aa, Clitoria ternatea
  REGION 1..31: note = "Insecticidal, Hemolytic, Anthelmintic, Antibacterial, Cytotoxic"; Cyclotide; Shown to possess various antimicrobial and cytotoxic activities.
GVPCAESCVWIPCTVTALLGCSCKDKVCYLD

SEQ ID NO: 2304 - protein, 28 aa, Clitoria ternatea
  REGION 1..28: note = "Insecticidal, Nematocide"; Cyclotide; Shown to possess Insecticidal and nematocidal activity.
DLICSSTCLHTPCKASVCYCKNAVCYKN

SEQ ID NO: 2305 - protein, 28 aa, Clitoria ternatea
  REGION 1..28: note = "Insecticidal, Nematocide"; Cyclotide; Shown to possess Insecticidal and nematocidal activity.
DLQCAETCVHSPCIGPCYCKHGVICYKN

SEQ ID NO: 2306 - protein, 28 aa, Clitoria ternatea
  REGION 1..28: note = "Insecticidal, Nematocide"; Cyclotide; Shown to possess Insecticidal and nematocidal activity.
GAFCGETCVLGTCYTPDCSCKAVVCIKN

SEQ ID NO: 2307 - protein, 28 aa, Clitoria ternatea
  REGION 1..28: note = "Insecticidal, Nematocide"; Cyclotide; Shown to possess Insecticidal and nematocidal activity.
GAFCGETCVLGTCYTPGCSCAPVICLNN

SEQ ID NO: 2308 - protein, 31 aa, Clitoria ternatea
  REGION 1..31: note = "Insecticidal, Nematocide"; Cyclotide; Shown to possess Insecticidal and nematocidal activity.
GALCDERCTYVPCISAARGCSCNIHRVCSMN

SEQ ID NO: 2309 - protein, 30 aa, Clitoria ternatea
  REGION 1..30: note = "Insecticidal, Nematocide"; Cyclotide; Shown to possess Insecticidal and nematocidal activity.
GDLFKCGETCFGGTCYTPGCSCDYPICKKN

SEQ ID NO: 2310 - protein, 30 aa, Clitoria ternatea
  REGION 1..30: note = "Insecticidal, Nematocide"; Cyclotide; Shown to possess Insecticidal and nematocidal activity.
GDPFKCGESCFAGKCYTPGCTCEYPICMNN

SEQ ID NO: 2311 - protein, 31 aa, Clitoria ternatea
  REGION 1..31: note = "Insecticidal, Nematocide"; Cyclotide; Shown to possess Insecticidal and nematocidal activity.
GDPLACGETCFGGTCYTPGCVCDPWPICTKN

SEQ ID NO: 2312 - protein, 30 aa, Clitoria ternatea
  REGION 1..30: note = "Insecticidal, Nematocide"; Cyclotide; Shown to possess Insecticidal and nematocidal activity.
GDPLKCGESCFAGKCYTPGCTCEYPICMNN

SEQ ID NO: 2313 - protein, 30 aa, Clitoria ternatea
  REGION 1..30: note = "Insecticidal, Nematocide"; Cyclotide; Shown to possess Insecticidal and nematocidal activity.
GEFLKCGESCVQGECYTPGCSCDYPICKNN

SEQ ID NO: 2314 - protein, 29 aa, Clitoria ternatea
  REGION 1..29: note = "Insecticidal, Nematocide"; Cyclotide; Shown to possess Insecticidal and nematocidal activity.
GFCLETCVILPCFSSVAGCYCHGSTCMRG

SEQ ID NO: 2315 - protein, 29 aa, Clitoria ternatea
  REGION 1..29: note = "Insecticidal, Nematocide"; Cyclotide; Shown to possess Insecticidal and nematocidal activity.
GFPICGETCFKTKCYTPGCSCSYPVCKKN

SEQ ID NO: 2316 - protein, 31 aa, Clitoria ternatea
  REGION 1..31: note = "Insecticidal, Nematocide"; Cyclotide; Shown to possess Insecticidal and nematocidal activity.
GIPCGESCVFIPCTVTALLGCSCKSKVCYKN

SEQ ID NO: 2317 - protein, 31 aa, Clitoria ternatea
  REGION 1..31: note = "Insecticidal, Nematocide"; Cyclotide; Shown to possess Insecticidal and nematocidal activity.
GIPCGESCVYIPCTVTALLGCSCRDKVCYKN

SEQ ID NO: 2318 - protein, 30 aa, Clitoria ternatea
  REGION 1..30: note = "Insecticidal, Nematocide"; Cyclotide; Shown to possess Insecticidal and nematocidal activity.
GLPICGETCFGGTCNTPNCVCDPWPICTNN

SEQ ID NO: 2319 - protein, 30 aa, Clitoria ternatea
  REGION 1..30: note = "Insecticidal, Nematocide"; Cyclotide; Shown to possess Insecticidal and nematocidal activity.
GNPIVCGETCFFQKCYTPGCSCDAVICTNN

SEQ ID NO: 2320 - protein, 29 aa, Clitoria ternatea
  REGION 1..29: note = "Insecticidal, Nematocide"; Cyclotide; Shown to possess Insecticidal and nematocidal activity.
GSAFCGETCVLGTCYTPDCSCKAVVCIKN

SEQ ID NO: 2321 - protein, 30 aa, Clitoria ternatea
  REGION 1..30: note = "Insecticidal, Nematocide"; Cyclotide; Shown to possess Insecticidal and nematocidal activity.
GSAIRCGERCLLGRCHRPGCTCIRRICRRN

SEQ ID NO: 2322 - protein, 29 aa, Clitoria ternatea
  REGION 1..29: note = "Insecticidal, Nematocide"; Cyclotide; Shown to possess Insecticidal and nematocidal activity.
GSIRCGERCLLGRCHRPGCTCIRRICRRN

SEQ ID NO: 2323 - protein, 30 aa, Clitoria ternatea
  REGION 1..30: note = "Insecticidal, Nematocide"; Cyclotide; Shown to possess Insecticidal and nematocidal activity.
GSPTCGETCFGGTCYTPGCVCDPWPICTKN

SEQ ID NO: 2324 - protein, 30 aa, Clitoria ternatea
  REGION 1..30: note = "Insecticidal, Nematocide"; Cyclotide; Shown to possess Insecticidal and nematocidal activity.
GSPTCGETCFGGTCYTPNCVCDPWPICTKN

SEQ ID NO: 2325 - protein, 31 aa, Clitoria ternatea
  REGION 1..31: note = "Insecticidal, Nematocide"; Cyclotide; Shown to possess Insecticidal and nematocidal activity.
GVIPCGESCVWIPCISAAIGCSCKKNVCYRN

SEQ ID NO: 2326 - protein, 31 aa, Clitoria ternatea
  REGION 1..31: note = "Insecticidal, Nematocide"; Cyclotide; Shown to possess Insecticidal and nematocidal activity.
GVIPCGESCVYLPCLTTIVGCSCKNNVCYTN

SEQ ID NO: 2327 - protein, 30 aa, Clitoria ternatea
  REGION 1..30: note = "Insecticidal, Nematocide"; Cyclotide; Shown to possess Insecticidal and nematocidal activity.
KIPCGESCVWIPCISSILGCSCKDKVCYHN

SEQ ID NO: 2328 - protein, 29 aa, Clitoria ternatea
  REGION 1..29: note = "Insecticidal, Nematocide"; Cyclotide; Shown to possess Insecticidal and nematocidal activity.
NTAFCGETCVLGTCYTPDCSCKAVVCIKN

SEQ ID NO: 2329 - protein, 29 aa, Clitoria ternatea
  REGION 1..29: note = "Insecticidal, Nematocide"; Cyclotide; Shown to possess Insecticidal and nematocidal activity.
NTAFCGETCVLGTCYTPDCSCTAIVCIKN

SEQ ID NO: 2330 - protein, 30 aa, Clitoria ternatea
  REGION 1..30: note = "Insecticidal, Nematocide"; Cyclotide; Shown to possess Insecticidal and nematocidal activity.
SIPCGESCVYIPCLTTIVGCSCKSNVCYSN

SEQ ID NO: 2331 - protein, 32 aa, Clitoria ternatea
  REGION 1..32: note = "Insecticidal, Nematocide"; Cyclotide; Shown to possess Insecticidal and nematocidal activity.
SYIPCGESCVYIPCTVTALLGCSCSNKVCYKN

SEQ ID NO: 2332 - protein, 31 aa, Oldenlandia affinis
  REGION 1..31: note = "Molluscicidal, Anti-HIV, Cytotoxic, Antiviral, Antibacterial"; Cyclotide; "Kalata B8 show molluscicidal, anti-HIV and cytotoxic activity."
GSVLNCGETCLLGTCYTTGCTCNKYRVCTKD

SEQ ID NO: 2333 - protein, 23 aa, Glycine max
  REGION 1..23: note = Nematocide; Defensin; "Activate plant defences through systemic transcriptional reprogramming and ROS signalling, and tha"
ASLMATRGSRGSKISDGSGPQHN

SEQ ID NO: 2334 - protein, 31 aa, Viola odorata
  REGION 1..31: note = "Nematocide, Anti-HIV, Hemolytic, Enzymatic-degradation, Antibacterial, Antifungal, Antiviral, Anti"; Cyclotide; "Showed significant activity in motility of adult worms; and also anti-HIV and hemolytic activity, "
GSIPACGESCFKGKCYTPGCSCSKYPLCAKN

SEQ ID NO: 2335 - protein, 30 aa, Viola odorata
  REGION 1..30: note = "Nematocide, Anti-HIV, Hemolytic, Enzymatic-degradation, Antibacterial, Antifungal, Antiviral, Anti"; Cyclotide; "participates in a plant defense mechanism.; Shown to possess nematocidal, anti-HIV, hemolytic and "
GIPCGESCVWIPCISAAIGCSCKSKVCYRN

SEQ ID NO: 2336 - protein, 31 aa, Viola odorata
  REGION 1..31: note = Viola odorata, Viola adunca; "Nematocide, Antimicrobial"; Cyclotide; Probably participates in a plant defense mechanism
GTLPCGESCVWIPCISSVVGCSCKSKVCYKN

SEQ ID NO: 2337 - protein, 29 aa, Viola odorata
  REGION 1..29: note = "Nematocide, Hemolytic, Antibacterial, Antifungal, Antiviral, Antiparasitic"; Cyclotide; "Showed significant nematocidal and hemolytic activity, participates in plant defense mechanism."
GLVPCGETCFTGKCYTPGCSCSYPICKKN

SEQ ID NO: 2338 - protein, 33 aa, Viola yedoensis
  REGION 1..33: note = "Nematocide, Hemolytic, Anti-HIV, Antiviral"; Cyclotide; "Shown to possess nematocidal, hemolytic and anti-HIV activity."
GGTIFDCGETCFLGTCYTPGCSCGNYGFCYGTN

SEQ ID NO: 2339 - protein, 30 aa, Viola odorata
  REGION 1..30: note = "Nematocide, Molluscicidal, Antimicrobial"; Cyclotide; The cycloviolacin O1 showed significant activity in inhibiting development of nematode larvae and
GIPCAESCVYIPCTVTALLGCSCSNRVCYN

SEQ ID NO: 2340 - protein, 30 aa, Viola hederacea
  REGION 1..30: note = Viola hederacea, Oldenlandia affinis; "Nematocide, Molluscicidal, Antimicrobial, Hemolytic"; Cyclic Peptide; participates in a plant defense mechanism; has hemolytic activity
GLPTCGETCFGGTCNTPGCSCSSWPICTRN

SEQ ID NO: 2341 - protein, 9 aa, Leonurus heterophyllus
  REGION 1..9: note = Neuropeptide; --NA--; shows moderate vasorelaxant effects on rat aorta.
APIVAAFTP

SEQ ID NO: 2342 - protein, 9 aa, Leonurus heterophyllus
  REGION 1..9: note = Neuropeptide; --NA--; shows moderate vasorelaxant effects on rat aorta.
GYPLPFYPP

SEQ ID NO: 2343 - protein, 8 aa, Stellaria dichotoma
  REGION 1..8: note = Stellaria dichotoma var. lanceolata; Neuropeptide; --NA--; inhibits vasocontraction induced by norepinephrine.
VIPAVIPY

SEQ ID NO: 2344 - protein, 9 aa, Stellaria dichotoma
  REGION 1..9: note = Stellaria dichotoma var. lanceolata; Neuropeptide; --NA--; inhibits vasocontraction induced by norepinephrine.
VIPAVIPYY

SEQ ID NO: 2345 - protein, 6 aa, Glycine max
  REGION 1..6: note = Neuropeptide; --NA--; inhibits electrically induced contraction of the guinea pig ileum myenteric plexus/longitudinal mu
YPFVVN

SEQ ID NO: 2346 - protein, 7 aa, Glycine max
  REGION 1..7: note = Neuropeptide; --NA--; inhibits electrically induced contraction of the guinea pig ileum myenteric plexus/longitudinal mu
YPFVVNA

SEQ ID NO: 2347 - protein, 5 aa, Glycine max
  REGION 1..5: note = "Neuropeptide, Antihyperglycemic, Anxiolytic"; Opioid; inhibits electrically induced contraction of the guinea pig ileum myenteric plexus/longitudinal mu
YPFVV

SEQ ID NO: 2348 - protein, 5 aa, Triticum aestivum
  REGION 1..5: note = "Neuropeptide, Opioid"; --NA--; "inhibits electrically induced contraction of the guinea pig ileum (GPI), IC50 = 1000 micro-M; inhibits "
GYYPT

SEQ ID NO: 2349 - protein, 5 aa, Triticum aestivum
  REGION 1..5: note = "Neuropeptide, Opioid"; --NA--; "inhibits electrically induced contraction of the guinea pig ileum (GPI), IC50 = .0.05 micro-M; inhibits"
YGGWL

SEQ ID NO: 2350 - protein, 5 aa, Triticum aestivum
  REGION 1..5: note = "Opioid-agonist, Neuropeptide"; --NA--; Influenced the regulation of gastro-intestinal motility and hormone release; acts as an opiate
YPISL

SEQ ID NO: 2351 - protein, 6 aa, Glycine max
  REGION 1..6: note = Phagocytosis-stimulatory-peptide; Bioactive peptides; Potentially used as functional foods or even therapeutics for the prevention or treatment of chron
HCQRPR

SEQ ID NO: 2352 - protein, 39 aa, Actinidia deliciosa
  REGION 1..39: note = Pore-forming; --NA--; is an anion-selective pore-forming peptide
ISSCNGPCRDLNDCDGQLICIKGKCNDDPQVGTHICRGT

SEQ ID NO: 2353 - protein, 34 aa, Momordica cochinchinensis
  REGION 1..34: note = Protease-inhibitor; Squash trypsin inhibitor; Important roles in proteolysis and perform protein cyclization.
GGACPRILKKCRRDSDCPGACVCKGNGYCGSGSD

SEQ ID NO: 2354 - protein, 34 aa, Momordica cochinchinensis
  REGION 1..34: note = Protease-inhibitor; Squash trypsin inhibitor; Important roles in proteolysis and perform protein cyclization.
GGACPRILKKCRRDSDCPGACVCQGNGYCGSGSD

SEQ ID NO: 2355 - protein, 34 aa, Momordica cochinchinensis
  REGION 1..34: note = Protease-inhibitor; Squash trypsin inhibitor; Important roles in proteolysis and perform protein cyclization.
GGVCPKILQRCRRDSDCPGACICLGNGYCGSGSD

SEQ ID NO: 2356 - protein, 8 aa, Jatropha curcas
  REGION 1..8: note = Protease-inhibitor; Orbitide; Shown to possess enzymatic inhibition activity.
GLLNLWGP

SEQ ID NO: 2357 - protein, 30 aa, Momordica cochinchinensis
  REGION 1..30: note = Protease-inhibitor; Squash trypsin inhibitor; Important roles in proteolysis and perform protein cyclization.
QRACPRILKKCRRDSDCPGECICKENGYCG

SEQ ID NO: 2358 - protein, 30 aa, Momordica cochinchinensis
  REGION 1..30: note = Protease-inhibitor; Squash trypsin inhibitor; Important roles in proteolysis and perform protein cyclization.
QRACPRILKKCRRDSDCPGECICKGNGYCG

SEQ ID NO: 2359 - protein, 30 aa, Momordica cochinchinensis
  REGION 1..30: note = Protease-inhibitor; Squash trypsin inhibitor; Important roles in proteolysis and perform protein cyclization.
QRACPRILKKCRRDSDCPGECICQGNGYCG

SEQ ID NO: 2360 - protein, 77 aa, Arabidopsis thaliana
  REGION 1..77: note = Protease-inhibitor; Defensin; "Low-molecular-weight cysteine-rich 70; LCR70/PDF2.1, protease inhibitor"
MKFSMRLISAVLFLVMIFVATGMGPVTVEARTCASQSQRFKGKCVSDTNCENVCHNEGFPGGDCRGFRRRCFCTRNC

SEQ ID NO: 2361 - protein, 77 aa, Arabidopsis thaliana
  REGION 1..77: note = Protease-inhibitor; Defensin; "Low-molecular-weight cysteine-rich 69; LCR69/PDF2.2, protease inhibitor"
MKLSMRLISAVLIMFMIFVATGMGPVTVEARTCESQSHRFKGTCVSASNCANVCHNEGFVGGNCRGFRRRCFCTRHC

SEQ ID NO: 2362 - protein, 77 aa, Arabidopsis thaliana
  REGION 1..77: note = Protease-inhibitor; Defensin; "Low-molecular-weight cysteine-rich 68; LCR69/PDF2.2, protease inhibitor"
MKLSVRFISAALLLFMVFIATGMGPVTVEARTCESKSHRFKGPCVSTHNCANVCHNEGFGGGKCRGFRRRCYCTRHC

SEQ ID NO: 2363 - protein, 14 aa, Helianthus annuus
  REGION 1..14: note = Helianthus annuus, Helianthus exilis, Helianthus tuberosus; "Protease-inhibitor, Enzymatic-degradation"; BBI-like trypsin inhibitor; "inhibits trypsin, cathepsin G, elastase, chymotrypsin and thrombin."
GRCTKSIPPICFPD

SEQ ID NO: 2364 - protein, 47 aa, Triticum aestivum
  REGION 1..47: note = "Protein-synthesis-inhibitor, Cytotoxic"; Defensin; inhibits protein synthesis in eukaryotic cell-free system; Shows cytotoxic activity. The toxic eff
KICRRRSAGFKGPCMSNKNCAQVCQQEGWGGGNCDGPFRRCKCIRQC

SEQ ID NO: 2365 - protein, 48 aa, Hordeum vulgare
  REGION 1..48: note = Protein-translation-inhibitor; --NA--; inhibits protein translation in cell free system
RICTGKSQHHHFPCISDKSCARNCVSEHGAHWTAGYCHLRRCTCQREC

SEQ ID NO: 2366 - protein, 5 aa, Dianthus superbus
  REGION 1..5: note = Toxin; --NA--; possesses cytotoxic (human carcinoma) activity.
GFYPF

SEQ ID NO: 2367 - protein, 7 aa, Stellaria yunnanensis
  REGION 1..7: note = Toxin; --NA--; exhibits cytotoxic activity
GGPFPGY

SEQ ID NO: 2368 - protein, 7 aa, Stellaria yunnanensis
  REGION 1..7: note = Toxin; --NA--; exhibits cytotoxic activity
GIGFYSP

SEQ ID NO: 2369 - protein, 36 aa, Cucurbita maxima
  REGION 1..36: note = Toxin; --NA--; is slightly toxic to mouse B-16 melanoma cells.
KRDPDWRREQQRREQQRRRREQQQQRRERQQRGERD

SEQ ID NO: 2370 - protein, 45 aa, Avena sativa
  REGION 1..45: note = Toxin; --NA--; --NA--
KSCCKDTLGRDCYDLCRARGAPKLCSTLCRCKITSGLSCPKDFPK

SEQ ID NO: 2371 - protein, 45 aa, Secale cereale
  REGION 1..45: note = Toxin; --NA--; --NA--
KSCCKSTLGRDCYDLCRGRGAEKLCAELCRCKITSGLSCPKDFPK

SEQ ID NO: 2372 - protein, 46 aa, Viscum album
  REGION 1..46: note = Toxin; --NA--; is toxic to animal cells
KSCCPNTTGRNIYNACRLTGAPRPTCAKLSGCKIISGSTCPSWPDK

SEQ ID NO: 2373 - protein, 46 aa, Viscum album
  REGION 1..46: note = Toxin; --NA--; is toxic to animal cells
KSCCPNTTGRNIYNTCRLGGGSRERCASLSGCKIISASTCPSYPDK

SEQ ID NO: 2374 - protein, 46 aa, Phoradendron liga
  REGION 1..46: note = Toxin; --NA--; is toxic to animal cells
KSCCPSTTARNIYNTCRLTGTSRPTCASLSGCKIISGSTCDSGWNH

SEQ ID NO: 2375 - protein, 46 aa, Viscum album
  REGION 1..46: note = Toxin; --NA--; is toxic to animal cells
KSCCPSTTGRNIYNTCRLTGSSRETCAKLSGCKIISASTCPSNYPK

SEQ ID NO: 2376 - protein, 46 aa, Phoradendron tomentosum
  REGION 1..46: note = Toxin; --NA--; exhibits highly selective cytotoxicity to human breast cancer cells.
KSCCPTTTARNIYNTCRFGGGSRPICAKLSGCKIISGTKCDSGWTH

SEQ ID NO: 2377 - protein, 46 aa, Phoradendron tomentosum
  REGION 1..46: note = Toxin; --NA--; exhibits highly selective cytotoxicity to human breast cancer cells.
KSCCPTTTARNIYNTCRFGGGSRPVCAKLSGCKIISGTKCDSGWDH

SEQ ID NO: 2378 - protein, 46 aa, Phoradendron tomentosum
  REGION 1..46: note = Phoradendron tomentosum subsp. macrophyllum; Toxin; --NA--; is toxic to animal cells
KSCCPTTTARNIYNYCRFGGGSRPICAKLSGCKIISGTKCDSNGDH

SEQ ID NO: 2379 - protein, 45 aa, Avena sativa
  REGION 1..45: note = Toxin; --NA--; --NA--
KSCCRDTLGRDCYDLCRSRGAPKLCATLCRCKISSGLSCPKDFPK

SEQ ID NO: 2380 - protein, 48 aa, Helleborus purpurascens
  REGION 1..48: note = Toxin; --NA--; is toxic to animal cells. It seems to exert its toxic effect at the level of the cell membranes.
KSCCRNTLGRNCYAACRLTGLFSQEQCARLCDCITVTTPTPCPRTHPS

SEQ ID NO: 2381 - protein, 46 aa, Helleborus purpurascens
  REGION 1..46: note = Toxin; --NA--; is toxic to animal cells. It seems to exert its toxic effect at the level of the cell membranes.
KSCCRNTLGRNCYNGCRFTGGSQPTCGRLCDCIHVTTTTCPSSHPS

SEQ ID NO: 2382 - protein, 37 aa, Thlaspi caerulescens
  REGION 1..37: note = Thlaspi caerulescens, Thlaspi calaminare; Toxin; --NA--; --NA--
MAGSKCGDSWSCEMNYNTECDSCSCGSDCSCGSNCNC

SEQ ID NO: 2383 - protein, 45 aa, Brassica juncea
  REGION 1..45: note = Toxin; --NA--; --NA--
MAGSNCGCGSGCKCGDSCSCEKNYNTECDNCSCGSNCSCGDSCSC

SEQ ID NO: 2384 - protein, 46 aa, Hordeum vulgare
  REGION 1..46: note = Toxin; Thionin; "is toxic to animal cells, to plant-pathogenic fungi"
KSCCKNTTGRNCYNACRFAGGSRPVCATACGCKIISGPTCPRDYPK

SEQ ID NO: 2385 - protein, 46 aa, Viscum album
  REGION 1..46: note = Toxin; Thionin; is toxic to animal cells
KSCCPNTTGRNIYNTCRFGGGSREVCASLSGCKIISASTCPSYPDK

SEQ ID NO: 2386 - protein, 47 aa, Zea mays
  REGION 1..47: note = Toxin; Defensin; is toxic to animal cells; Acts as a sodium channel blocker
RVCMGKSQHHSFPCISDRLCSNECVKEDGGWTAGYCHLRYCRCQKAC

SEQ ID NO: 2387 - protein, 47 aa, Zea mays [sequence omitted]

SEQ ID NO: 2388 - protein, 37 aa, Triticum aestivum
  REGION 1..37: note = Triticum aestivum, Aegilops tauschii; Toxin; Defensin; is toxic to animal cells
VDCGANPFKVACFNSCLLGPSTVFQCADFCACRLPAG

SEQ ID NO: 2389 - protein, 46 aa, Arabidopsis thaliana
  REGION 1..46: note = Toxin; Thionin; is toxic to animal cells.
KICCPTKDDRSVYFVCMLSVSSQFYCLLKSKCKNTSQTICPPGYTN

SEQ ID NO: 2390 - protein, 45 aa, Triticum aestivum
  REGION 1..45: note = Triticum aestivum v. Maniton; "Toxin, Antifungal"; Thionin; is toxic to animal cells
KSCCRTTLGRNCYNLCRSRGAQKLCSTVCRCKLTSGLSCPKGFPK

SEQ ID NO: 2391 - protein, 12 aa, Helianthus annuus
  REGION 1..12: note = Helianthus annuus, Helianthus argophyllus; Trypsin-inhibitor; Cyclic Peptide; Inhibition of enzyme
GCIEGSPVCFPD

SEQ ID NO: 2392 - protein, 8 aa, Stellaria yunnanensis
  REGION 1..8: note = Tyrosinase-and-melanin-inhibitor; Orbitide; Inhibit the tyrosinase and melanin activity.
PPFGIGGG

SEQ ID NO: 2393 - protein, 8 aa, Stellaria yunnanensis
  REGION 1..8: note = Tyrosinase-and-melanin-inhibitor; Orbitide; Inhibit the tyrosinase and melanin activity.
PSPFLGTL

SEQ ID NO: 2394 - protein, 5 aa, Stellaria yunnanensis
  REGION 1..5: note = Tyrosinase-and-melanin-inhibitor; Orbitide; Inhibit the tyrosinase and melanin activity.
PYLAG

SEQ ID NO: 2395 - protein, 8 aa, Stellaria yunnanensis
  REGION 1..8: note = Tyrosinase-inhibitor; Orbitide; Inhibited the tyrosinase activity.
PFSFGPLA

SEQ ID NO: 2396 - protein, 7 aa, Stellaria yunnanensis
  REGION 1..7: note = Tyrosinase-inhibitor; Orbitide; Inhibited the tyrosinase activity.
PLILGYG

SEQ ID NO: 2397 - protein, 9 aa, Stellaria yunnanensis
  REGION 1..9: note = Tyrosinase-inhibitor; Orbitide; Inhibited the tyrosinase activity.
PPLGPVIFG

SEQ ID NO: 2398 - protein, 8 aa, Stellaria yunnanensis
  REGION 1..8: note = Tyrosinase-inhibitor; Orbitide; Inhibited the tyrosinase activity.
PPLSGGYL

SEQ ID NO: 2399 - protein, 8 aa, Stellaria yunnanensis
  REGION 1..8: note = Tyrosinase-inhibitor; Orbitide; Inhibited the tyrosinase activity.
PTPLFFGT

SEQ ID NO: 2400 - protein, 29 aa, Rinorea dentata
  REGION 1..29: note = Uterotonic; Cyclotide; Shown to possess uterotonic activity.
GLPVCGETCVGGTCNTPGCTCTWPVCTRN

SEQ ID NO: 2401 - protein, 9 aa, Vaccaria hispanica
  REGION 1..9: note = Vasorelaxant; Orbitide; Shows vasorelaxant activity.
FSASYSSKP

SEQ ID NO: 2402 - protein, 5 aa, synthetic construct
  REGION 1..5: note = Synthetic Construct
  REGION 1..5: note = Can present in repeats
GGGGS

SEQ ID NO: 2403 - protein, 12 aa, synthetic construct
  REGION 1..12: note = Synthetic Construct
MELNHFELLYKW

SEQ ID NO: 2404 - protein, 12 aa, synthetic construct
  REGION 1..12: note = Synthetic Construct
MASMTGGQQMGW

SEQ ID NO: 2405 - protein, 12 aa, synthetic construct
  REGION 1..12: note = Synthetic Construct
MRRKKRPDPDSW

SEQ ID NO: 2406 - protein, 12 aa, synthetic construct
  REGION 1..12: note = Synthetic Construct
MTKEAERLDVPW

SEQ ID NO: 2407 - protein, 12 aa, synthetic construct
  REGION 1..12: note = Synthetic Construct
MPEEVFHGDAHW

SEQ ID NO: 2408 - protein, 12 aa, synthetic construct
  REGION 1..12: note = Synthetic Construct
MTHTIKAMEPFW

SEQ ID NO: 2409 - protein, 11 aa, synthetic construct
  REGION 1..11: note = Synthetic Construct
MERHVVEQQLW

SEQ ID NO: 2410 - protein, 12 aa, synthetic construct
  REGION 1..12: note = Synthetic Construct
MKRRVILFSSQW

SEQ ID NO: 2411 - protein, 11 aa, synthetic construct
  REGION 1..11: note = Synthetic Construct
MGQEWLTFQKK

SEQ ID NO: 2412 - protein, 125 aa, synthetic construct
  REGION 1..125: note = Synthetic Construct
MGQEWLTFQKKHITNTREVEYENILSTNLFHYKEKNTFIYSRPEPVKAILKGIIASKNVLTTSEFYLSEYNVTSRPYKYKLKKSTNKFIVTIENQAPVHFVGGSHHHHHHGTGDPKKEEMSYMKR

SEQ ID NO: 2413 - protein, 119 aa, synthetic construct
  REGION 1..119: note = Synthetic Construct
MGQEWLTFQKKHITNTREVEYENILSTNLFHYKEKNTFIYSRPEPVKAILKGIIASKNVLTTSEFYLSEYNVTSRPYAYALKASTNKFIVTIENQAPVHFVGGSGTGDPKKEEMSYMKR

SEQ ID NO: 2414 - protein, 120 aa, synthetic construct
  REGION 1..120: note = Synthetic Construct
MELNHFELLYKWHITNTREVEYENILSTNLFHYKEKNTFIYSRPEPVKAILKGIIASKNVLTTSEFYLSEYNVTSRPYAYALKASTNKFIVTIENQAPVHFVGGSGTGDPKKEEMSYMKR

SEQ ID NO: 2415 - protein, 120 aa, synthetic construct
  REGION 1..120: note = Synthetic Construct
MELNHFELLYKWHITNTREVEYENILSTNLFHYKEKNTFIYSRPEPVKAILKGIIASKNVLTTSEFYLSEYNVTSRPYEYALKASTNKFIVTIENQAPVHFVGGSGTGDPKKEEMSYMKR

SEQ ID NO: 2416 - protein, 120 aa, synthetic construct
  REGION 1..120: note = Synthetic Construct
MELNHFELLYKWHITNTREVEYENILSTNLFHYKEKNTFIYSRPEPVKAILKGIIASKNVLTTSEFYLSEYNVTSRPYEYELKASTNKFIVTIENQAPVHFVGGSGTGDPKKEEMSYMKR

SEQ ID NO: 2417 - protein, 120 aa, synthetic construct
  REGION 1..120: note = Synthetic Construct
MELNHFELLYKWHITNTREVEYENILSTNLFHYKEKNTFIYSRPEPVKAILKGIIASKNVLTTSEFYLSEYNVTSRPYEYELKESTNKFIVTIENQAPVHFVGGSGTGDPKKEEMSYMKR

SEQ ID NO: 2418 - protein, 120 aa, synthetic construct
  REGION 1..120: note = Synthetic Construct
MELNHFELLYKWHITNTREVEYENILSTNLFHYEEKNTFIYSRPEPVKAILKGIIASKNVLTTSEFYLSEYNVTSRPYEYELKESTNKFIVTIENQAPVHFVGGSGTGDPKKEEMSYMKR

SEQ ID NO: 2419 - protein, 120 aa, synthetic construct
  REGION 1..120: note = Synthetic Construct
MELNHFELLYKWHITNTREVEYENILSTNLFHYEEKNTFIYSRPEPVKAILEGIIASKNVLTTSEFYLSEYNVTSRPYEYELKESTNKFIVTIENQAPVHFVGGSGTGDPKKEEMSYMKR

SEQ ID NO: 2420 - protein, 120 aa, synthetic construct
  REGION 1..120: note = Synthetic Construct
MELNHFELLYKWHITNTREVEYENILSTNLFHYEEKNTFIYSRPEPVKAILEGIIASKNVLTTSEFYLSEYNVTSRPYEYELKESTNEFIVTIENQAPVHFVGGSGTGDPKKEEMSYMKR

SEQ ID NO: 2421 - protein, 120 aa, synthetic construct
  REGION 1..120: note = Synthetic Construct
MELNHFELLYKWHITNTREVEYENILSTNLFHYEEKNTFIYSRPEPVKAILEGIIASENVLTTSEFYLSEYNVTSRPYEYELKESTNEFIVTIENQAPVHFVGGSGTGDPKKEEMSYMKR
